(19) United States
(12) Patent Application Publication
(10) Pub. No.: US 2024/0209372 A1
(43) Pub. Date: Jun. 27, 2024

(54) PROLINE DEHYDROGENASE 2 (PRODH2) IRNA COMPOSITIONS AND METHODS OF USE THEREOF

(71) Applicant: Alnylam Pharmaceuticals, Inc., Cambridge, MA (US)

(72) Inventors: David Erbe, Arlington, MA (US); James D. McIninch, Burlington, MA (US)

(21) Appl. No.: 18/373,397

(22) Filed: Sep. 27, 2023

Related U.S. Application Data
(63) Continuation of application No. PCT/US2022/021635, filed on Mar. 24, 2022.
(60) Provisional application No. 63/215,578, filed on Jun. 28, 2021.
(60) Provisional application No. 63/169,329, filed on Apr. 1, 2021.

(51) Int. Cl. C12N 15/113; A61K 47/54

(52) U.S. Cl. CPC C12N 15/1137; A61K 47/549; C12N 2310/11; C12N 2310/3125; C12N 2310/315; C12N 2310/351

(57) ABSTRACT

The present invention relates to RNAi agents, e.g., double stranded RNA (dsRNA) agents, targeting the proline dehydrogenase 2 (PRODH2) gene. The invention also relates to methods of using such RNAi agents to inhibit expression of a PRODH2 gene and to methods of preventing and treating a PRODH2-associated disorder, e.g., primary hyperoxalurias and/or kidney stone diseases.

### RELATED APPLICATIONS

[0001] This application is a 35 § U.S.C. 111(a) continuation application which claims the benefit of priority to PCT/US2022/021635, filed on Mar. 24, 2022, which, in turn, claims the benefit of priority to U.S. Provisional Application No. 63/169,329, filed on Apr. 1, 2021, and U.S. Provisional Application No. 63/215,578, filed on Jun. 28, 2021. The entire contents of each of the foregoing applications are incorporated herein by reference.

### SEQUENCE LISTING

[0002] The application contains a Sequence Listing which has been submitted electronically in .XML format and is hereby incorporated by reference in its entirety. Said .XML copy, created on Feb. 28, 2024, is named “121301_15503_SL.xml” and is 4,089,953 bytes bytes in size. The sequence listing contained in this .XML file is part of the specification and is hereby incorporated by reference herein in its entirety.

### BACKGROUND OF THE INVENTION

[0003] Primary hyperoxaluria (PH) is a metabolic disorder characterized by impaired glyoxylate metabolism resulting in overproduction and accumulation of oxalate throughout the body, typically manifesting as kidney and bladder stones. Under normal circumstances, oxalate is produced at low levels and continuously removed by the kidneys from blood and excreted in urine. However, in PH patients, renal accumulation of oxalate results in progressive renal inflammation, nephrocalcinosis and urolithiasis, which can cause decreased renal function, systemic oxalate deposition, and end-stage renal failure.

[0004] There are three types of primary hyperoxaluria that differ in their severity and genetic cause. Primary hyperoxaluria type 1 (PH1) results from mutation in peroxisomal alanine:glyoxylate aminotransferase (Danpure C J, et al., FEBS Lett. 1986; 201(1):20-4). In PH1, kidney stones typically begin to appear anytime from childhood to early adulthood, and end stage renal disease can develop at any age. Primary hyperoxaluria type 2 (PH2) is similar to type 1, but PH2 results from mutations in glyoxylate reductase, and end stage renal disease develops later in life (Giafi C F, et al., Ann Clin Biochem. 1998; 35 (Pt 1):104-9). Primary hyperoxaluria type 3 (PH3) results from inactivating mutations in 4-hydroxy-2-oxoglutarate aldolase (Belostotsky R, et al., Am J Hum Genet. 2010; 87(3):392-9). In PH3, affected individuals often develop kidney stones in early childhood, but few cases of this type have been described so additional signs and symptoms of this type are unclear.

[0005] Proline dehydrogenase 2 (PRODH2), also known as hydroxyproline oxidase, is an enzyme which catalyzes the first step in the catabolism of hydroxyproline, an amino acid derivative obtained through food intake and collagen turnover. Hydroxyproline is converted into 4-hydroxy-2-oxoglutarate (HOG) by a series of enzymes including PRODH2, and then converted into glyoxylate and pyruvate (FIG. 1). Hydroxylproline metabolism occurs primary in liver and renal cortex, and makes a significant contribution to the pool of glyoxylate within the body. Therefore, inhibition of PRODH2 would result in a decreased level of glyoxylate, making it an attractive pharmacological target for primary hyperoxaluria and/or other diseases associated with stone formation.

[0006] Current treatments for primary hyperoxaluria are centered around renal function conservation, and these include increased fluid intake and chemicals, such as alkali citrate, to inhibit calcium oxalate crystallization in the urine. Liver/kidney transplantation has also been used in PH1 patients. However, these treatment are not always effective. Accordingly, there is a need in the art for alternative treatments for subjects having primary hyperoxaluria and/or other kidney stone diseases.

### SUMMARY OF THE INVENTION

[0007] The present invention provides iRNA compositions which affect the RNA-induced silencing complex (RISC)-mediated cleavage of RNA transcripts of a gene encoding proline dehydrogenase 2 (PRODH2). The PRODH2 gene may be within a cell, e.g., a cell within a subject, such as a human subject. The present invention also provides methods of using the iRNA compositions of the invention for inhibiting the expression of a PRODH2 gene and/or for treating a subject who would benefit from inhibiting or reducing the expression of a PRODH2 gene, e.g., a subject suffering or prone to suffering from a PRODH2-associated disorder, e.g., primary hyperoxaluria and/or kidney stone diseases.

[0008] Accordingly, in an aspect, the invention provides a double stranded ribonucleic acid (dsRNA) agent for inhibiting expression of proline dehydrogenase 2 (PRODH2) in a cell, wherein the dsRNA agent comprises a sense strand and an antisense strand forming a double stranded region, wherein the sense strand comprises at least 15, e.g., 15, 16, 17, 18, 19, 20, or 21, contiguous nucleotides differing by no more than 0, 1, 2, or 3 nucleotides from the nucleotide sequence of SEQ ID NO:1 and the antisense strand comprises at least 15, e.g., 15, 16, 17, 18, 19, 20, 21, 22, or 23, contiguous nucleotides differing by no more than 1, 2, or 3 nucleotides from the nucleotide sequence of SEQ ID NO:2.

[0009] In another aspect, the present invention provides a double stranded ribonucleic acid (dsRNA) for inhibiting expression of proline dehydrogenase 2 (PRODH2) in a cell, wherein said dsRNA comprises a sense strand and an antisense strand forming a double stranded region, wherein the antisense strand comprises a region of complementarity to an mRNA encoding PRODH2, and wherein the region of complementarity comprises at least 15, e.g., 15, 16, 17, 18, 19, 20, 21, 22, or 23, contiguous nucleotides differing by no more than 0, 1, 2, or 3 nucleotides from any one of the antisense nucleotide sequences in any one of Tables 2-3.

[0010] In another aspect, the present invention provides a double stranded ribonucleic acid (dsRNA) agent for inhibiting expression of proline dehydrogenase 2 (PRODH2) in a cell, wherein the dsRNA agent comprises a sense strand and an antisense strand forming a double stranded region, wherein the sense strand comprises at least 15, e.g., 15, 16, 17, 18, 19, 20, or 21, contiguous nucleotides differing by no more than 0, 1, 2 or 3 nucleotides from any one of the nucleotide sequence of nucleotides 47-69, 262-284, 273-295, 545-567, 611-633, 655-677, 942-964, 949-971, 1119-1141, 1173-1195, 1183-1205, 1215-1237, 1243-1265, 1249-1271, 1254-1276, 1354-1376, 1436-1458, and 1444-1466 of SEQ ID NO:1, and the antisense strand comprises at least 15, e.g., 15, 16, 17, 18, 19, 20, 21, 22, or 23, contiguous nucleotides from the corresponding nucleotide sequence of SEQ ID NO: 2.

[0011] In some embodiments, the antisense strand comprises at least 15, e.g., 15, 16, 17, 18, 19, 20, 21, 22, or 23, contiguous nucleotides differing by no more than 0, 1, 2 or 3 nucleotides from any one of the antisense strand nucleotide sequences of a duplex selected from the group consisting of AD-1554704.1, AD-1554696.1, AD-1554658.1, AD-1554578.1, AD-1554573.1, AD-1554567.1, AD-1554557.1, AD-1554525.1, AD-1554515.1, AD-1554461.1, AD-1554340.1, AD-1554333.1, AD-1554126.1, AD-1554082.1, AD-1554036.1, AD-1553820.1, AD-1553809.1, and AD-1553674.1.

[0012] In one embodiment, the dsRNA agent comprises at least one modified nucleotide.

[0013] In one embodiment, substantially all of the nucleotides of the sense strand; substantially all of the nucleotides of the antisense strand comprise a modification; or substantially all of the nucleotides of the sense strand and substantially all of the nucleotides of the antisense strand comprise a modification.

[0014] In one embodiment, all of the nucleotides of the sense strand comprise a modification; all of the nucleotides of the antisense strand comprise a modification; or all of the nucleotides of the sense strand and all of the nucleotides of the antisense strand comprise a modification.

[0015] In one embodiment, at least one of the modified nucleotides is selected from the group consisting of a deoxy-nucleotide, a 3′-terminal deoxythimidine (dT) nucleotide, a 2′-O-methyl modified nucleotide, a 2′-fluoro modified nucleotide, a 2′-deoxy-modified nucleotide, a locked nucleotide, an unlocked nucleotide, a conformationally restricted nucleotide, a constrained ethyl nucleotide, an abasic nucleotide, a 2′-amino-modified nucleotide, a 2′-O-allyl-modified nucleotide, 2′-C-alkyl-modified nucleotide, 2′-hydroxly-modified nucleotide, a 2′-methoxyethyl modified nucleotide, a 2′-O-alkyl-modified nucleotide, a morpholino nucleotide, a phosphoramidate, a non-natural base comprising nucleotide, a tetrahydropyran modified nucleotide, a 1,5-anhydrohexitol modified nucleotide, a cyclohexenyl modified nucleotide, a nucleotide comprising a phosphorothioate group, a nucleotide comprising a methylphosphonate group, a nucleotide comprising a 5′-phosphate, a nucleotide comprising a 5′-phosphate mimic, a thermally destabilizing nucleotide, a glycol modified nucleotide (GNA), a nucleotide comprising a 2′ phosphate, and a 2-O—(N-methylacetamide) modified nucleotide; and combinations thereof.

[0016] In one embodiment, the modifications on the nucleotides are selected from the group consisting of LNA, HNA, CeNA, 2′-methoxyethyl, 2′-O-alkyl, 2′-O-allyl, 2′-C-allyl, 2′-fluoro, 2′-deoxy, 2′-hydroxyl, and glycol; and combinations thereof.

[0017] In one embodiment, at least one of the modified nucleotides is selected from the group consisting of a deoxy-nucleotide, a 2′-O-methyl modified nucleotide, a 2′-fluoro modified nucleotide, a 2′-deoxy-modified nucleotide, a glycol modified nucleotide (GNA), e.g., Ggn, Cgn, Tgn, or Agn, a nucleotide with a 2′ phosphate, e.g., G2p, C2p, A2p or U2p, and, a vinyl-phosphonate nucleotide; and combinations thereof.

[0018] In some embodiments, the modified nucleotide comprises a short sequence of 3′-terminal deoxythimidine nucleotides (dT).

[0019] In some embodiments, the dsRNA agent further comprises at least one phosphorothioate internucleotide linkage. In some embodiments, the dsRNA agent comprises 6-8 phosphorothioate internucleotide linkages. In one embodiment, the phosphorothioate or methylphosphonate internucleotide linkage is at the 3′-terminus of one strand. Optionally, the strand is the antisense strand. In another embodiment, the strand is the sense strand. In a related embodiment, the phosphorothioate or methylphosphonate internucleotide linkage is at the 5′-terminus of one strand. Optionally, the strand is the antisense strand. In another embodiment, the strand is the sense strand. In another embodiment, the phosphorothioate or methylphosphonate internucleotide linkage is at the both the 5′- and 3′-terminus of one strand. Optionally, the strand is the antisense strand. In another embodiment, the strand is the sense strand.

[0020] The double stranded region may be 19-30 nucleotide pairs in length; 19-25 nucleotide pairs in length; 19-23 nucleotide pairs in length; 23-27 nucleotide pairs in length; or 21-23 nucleotide pairs in length.

[0021] In one embodiment, each strand is independently no more than 30 nucleotides in length.

[0022] In one embodiment, the sense strand is 21 nucleotides in length and the antisense strand is 23 nucleotides in length.

[0023] The region of complementarity may be at least 17 nucleotides in length; between 19 and 23 nucleotides in length; or 19 nucleotides in length.

[0024] In one embodiment, at least one strand comprises a 3′ overhang of at least 1 nucleotide. In another embodiment, at least one strand comprises a 3′ overhang of at least 2 nucleotides.

[0025] In one embodiment, the dsRNA agent further comprises a ligand.

[0026] In one embodiment, the ligand is conjugated to the 3′ end of the sense strand of the dsRNA agent.

[0027] In one embodiment, the ligand is an N-acetylgalactosamine (GalNAc) derivative.

[0028] In one embodiment, the ligand is one or more GalNAc derivatives attached through a monovalent, bivalent, or trivalent branched linker.

[0029] In one embodiment, the ligand is

[chemical structure]

[0030] In one embodiment, the dsRNA agent is conjugated to the ligand as shown in the following schematic

[chemical structure]

and, wherein X is O or S.

[0031] In one embodiment, the X is O.

[0032] In one embodiment, the dsRNA agent further comprises at least one phosphorothioate or methylphosphonate internucleotide linkage.

[0033] In one embodiment, the phosphorothioate or methylphosphonate internucleotide linkage is at the 3′-terminus of one strand, e.g., the antisense strand or the sense strand.

[0034] In another embodiment, the phosphorothioate or methylphosphonate internucleotide linkage is at the 5′-terminus of one strand, e.g., the antisense strand or the sense strand.

[0035] In one embodiment, the phosphorothioate or methylphosphonate internucleotide linkage is at the both the 5′- and 3′-terminus of one strand. In one embodiment, the strand is the antisense strand.

[0036] In one embodiment, the base pair at the 1 position of the 5′-end of the antisense strand of the duplex is an AU base pair.

[0037] In another embodiment, the RNAi agent is a pharmaceutically acceptable salt thereof. “Pharmaceutically acceptable salts” of each of RNAi agents herein include, but are not limited to, a sodium salt, a calcium salt, a lithium salt, a potassium salt, an ammonium salt, a magnesium salt, an mixtures thereof. One skilled in the art will appreciate that the RNAi agent, when provided as a polycationic salt having one cation per free acid group of the optionally modified phosophodiester backbone and/or any other acidic modifications (e.g., 5′-terminal phosphonate groups). For example, an oligonucleotide of “n” nucleotides in length contains n−1 optionally modified phosophodiesters, so that an oligonucleotide of 21 nt in length may be provided as a salt having up to 20 cations (e.g., 20 sodium cations). Similarly, an RNAi agents having a sense strand of 21 nt in length and an antisense strand of 23 nt in length may be provided as a salt having up to 42 cations (e.g., 42 sodium cations). In the preceding example, where the RNAi agent also includes a 5′-terminal phosphate or a 5′-terminal vinylphosphonate group, the RNAi agent may be provided as a salt having up to 44 cations (e.g., 44 sodium cations).

[0038] The present invention also provides cells containing any of the dsRNA agents of the invention and pharmaceutical compositions comprising any of the dsRNA agents of the invention.

[0039] The pharmaceutical composition of the invention may include dsRNA agent in an unbuffered solution, e.g., saline or water, or the pharmaceutical composition of the invention may include the dsRNA agent is in a buffer solution, e.g., a buffer solution comprising acetate, citrate, prolamine, carbonate, or phosphate or any combination thereof; or phosphate buffered saline (PBS).

[0040] In one aspect, the present invention provides a method of inhibiting expression of a proline dehydrogenase 2 (PRODH2) gene in a cell. The method includes contacting the cell with any of the dsRNAs of the invention or any of the pharmaceutical compositions of the invention, thereby inhibiting expression of the PRODH2 gene in the cell.

[0041] In one embodiment, the cell is within a subject, e.g., a human subject, e.g., a subject having a proline dehydrogenase 2 (PRODH2)-associated disorder, such as primary hyperoxaluria and/or kidney stone diseases.

[0042] In certain embodiments, the PRODH2 expression is inhibited by at least about 30%, 40%, 50%, 60%, 70%, 80%, 90%, or 95%. In one embodiment, inhibiting expression of PRODH2 decreases PRODH2 protein level in serum of the subject by at least 30%, 40%, 50%, 60%, 70%, 80%, 90%, or 95%.

[0043] In one aspect, the present invention provides a method of treating a subject having a disorder that would benefit from reduction in proline dehydrogenase 2 (PRODH2) expression. The method includes administering to the subject a therapeutically effective amount of any of the dsRNAs of the invention or any of the pharmaceutical compositions of the invention, thereby treating the subject having the disorder that would benefit from reduction in PRODH2 expression.

[0044] In another aspect, the present invention provides a method of preventing at least one symptom in a subject having a disorder that would benefit from reduction in proline dehydrogenase 2 (PRODH2) expression. The method includes administering to the subject a prophylactically effective amount of any of the dsRNAs of the invention or any of the pharmaceutical compositions of the invention, thereby preventing at least one symptom in the subject having the disorder that would benefit from reduction in PRODH2 expression.

[0045] In certain embodiments, the disorder is a proline dehydrogenase 2 (PRODH2)-associated disorder. In some embodiments, the PRODH2-associated disorder is primary hyperoxaluria. In some embodiments, the PRODH2-associated disorder is a kidney stone disease.

[0046] In one embodiment, the kidney stone disease is a recurrent kidney stone disease. In another embodiment, the kidney stone disease is a non-recurrent kidney stone disease.

[0047] In one embodiment, the subject suffering from the kidney stone disease has had a surgery to remove a kidney stone.

[0048] In one embodiment, the kidney stone disease is a calcium oxalate kidney stone disease or a non-calcium oxalate kidney stone disease.

[0049] In certain embodiments, administration of the dsRNA to the subject causes a decrease in the glyoxylate level, oxalate level and/or glycolate level and/or a decrease in PRODH2 protein accumulation in the subject.

[0050] In a further aspect, the present invention also provides methods of inhibiting the expression of PRODH2 in a subject. The methods include administering to the subject a therapeutically effective amount of any of the dsRNAs provided herein, thereby inhibiting the expression of PRODH2 in the subject.

[0051] In one embodiment, the subject is human.

[0052] In one embodiment, the dsRNA agent is administered to the subject at a dose of about 0.01 mg/kg to about 50 mg/kg.

[0053] In one embodiment, the dsRNA agent is administered to the subject subcutaneously or intravenously.

[0054] In one embodiment, the methods of the invention include further determining the level of PRODH2 in a sample(s) from the subject.

[0055] In one embodiment, the level of PRODH2 in the subject sample(s) is a PRODH2 protein level in a blood or serum sample(s).

[0056] In one embodiment, the methods of the invention include further determining the level of glyoxylate, oxalate and/or glycolate in a sample(s) from the subject.

[0057] In one embodiment, the levels of glyoxylate, oxalate and/or glycolate are determined from a blood, plasma, urine or tissue sample(s).

[0058] In certain embodiments, the methods of the invention further comprise administering to the subject an additional therapeutic agent.

[0059] The present invention also provides kits comprising any of the dsRNAs of the invention or any of the pharmaceutical compositions of the invention, and optionally, instructions for use. In one embodiment, the invention provides a kit for performing a method of inhibiting expression of PRODH2 gene in a cell by contacting a cell with a double stranded RNAi agent of the invention in an amount effective to inhibit expression of the PRODH2 in the cell. The kit comprises an RNAi agent and instructions for use and, optionally, means for administering the RNAi agent to a subject.

[0060] The present invention further provides an RNA-induced silencing complex (RISC) comprising an antisense strand of any of the dsRNA agents of the invention.

### BRIEF DESCRIPTION OF THE FIGURES

[0061] FIG. 1 depicts the intersection between hydroxyproline and glyoxylate metabolic pathways. Hydroxyproline is acted upon by proline dehydrogenase 2 (PRODH2 or HYPDH), 1-pyrroline-5-carboxylate dehydrogenase (1P5CDH), and aspartate aminotransferase in succession to give 4-hydroxy-2-oxogluatarate (HOG). HOG is cleaved by HOG aldolase (HOGA) to yield pyruvate and glyoxylate. Glyoxylate is converted to glycolate by glyoxylate reductase (GR) in both the mitochondrial and cytoplasmic compartments. Conversion of glycolate back into glyoxylate by glycolate oxidase (GO) in the peroxisome results in the formation of glycine via alanine:glyoxylate aminotransferase (AGT). The enzymes mutated in PH1, PH2 and PH3 are indicated.

### DETAILED DESCRIPTION OF THE INVENTION

[0062] The present invention provides iRNA compositions which effect the RNA-induced silencing complex (RISC)-mediated cleavage of RNA transcripts of a proline dehydrogenase 2 (PRODH2) gene. The gene may be within a cell, e.g., a cell within a subject, such as a human. The use of these iRNAs enables the targeted degradation of mRNAs of the corresponding gene (PRODH2) in mammals.

[0063] The iRNAs of the invention have been designed to target the human proline dehydrogenase 2 (PRODH2) gene, including portions of the gene that are conserved in the PRODH2 orthologs of other mammalian species. Without intending to be limited by theory, it is believed that a combination or sub-combination of the foregoing properties and the specific target sites or the specific modifications in these iRNAs confer to the iRNAs of the invention improved efficacy, stability, potency, durability, and safety.

[0064] Accordingly, the present invention provides methods for treating and preventing a proline dehydrogenase 2 (PRODH2)-associated disorder, e.g., primary hyperoxaluria and/or kidney stone diseases, using iRNA compositions which effect the RNA-induced silencing complex (RISC)-mediated cleavage of RNA transcripts of a PRODH2 gene.

[0065] The iRNAs of the invention include an RNA strand (the antisense strand) having a region which is up to about 30 nucleotides or less in length, e.g., 19-30, 19-29, 19-28, 19-27, 19-26, 19-25, 19-24, 19-23, 19-22, 19-21, 19-20, 20-30, 20-29, 20-28, 20-27, 20-26, 20-25, 20-24, 20-23, 20-22, 20-21, 21-30, 21-29, 21-28, 21-27, 21-26, 21-25, 21-24, 21-23, or 21-22 nucleotides in length, which region is substantially complementary to at least part of an mRNA transcript of a PRODH2 gene.

[0066] In certain embodiments, one or both of the strands of the double stranded RNAi agents of the invention is up to 66 nucleotides in length, e.g., 36-66, 26-36, 25-36, 31-60, 22-43, 27-53 nucleotides in length, with a region of at least 19 contiguous nucleotides that is substantially complementary to at least a part of an mRNA transcript of a PRODH2 gene. In some embodiments, such iRNA agents having longer length antisense strands may, for example, include a second RNA strand (the sense strand) of 20-60 nucleotides in length wherein the sense and antisense strands form a duplex of 18-30 contiguous nucleotides.

[0067] The use of iRNAs of the invention enables the targeted degradation of mRNAs of the corresponding gene (PRODH2 gene) in mammals. Using in vitro assays, the present inventors have demonstrated that iRNAs targeting a PRODH2 gene can potently mediate RNAi, resulting in significant inhibition of expression of a PRODH2 gene. Thus, methods and compositions including these iRNAs are useful for treating a subject having a PRODH2-associated disorder, e.g., primary hyperoxalurias.

[0068] Accordingly, the present invention provides methods and combination therapies for treating a subject having a disorder that would benefit from inhibiting or reducing the expression of a PRODH2 gene, e.g., a proline dehydrogenase 2 (PRODH2)-associated disease, such as primary hyperoxaluria and/or kidney stone diseases, using iRNA compositions which effect the RNA-induced silencing complex (RISC)-mediated cleavage of RNA transcripts of a PRODH2 gene.

[0069] The present invention also provides methods for preventing at least one symptom in a subject having a disorder that would benefit from inhibiting or reducing the expression of a PRODH2 gene, e.g., primary hyperoxaluria and/or kidney stone diseases.

[0070] The following detailed description discloses how to make and use compositions containing iRNAs to inhibit the expression of a PRODH2 gene as well as compositions, uses, and methods for treating subjects that would benefit from inhibition and/or reduction of the expression of a PRODH2 gene, e.g., subjects susceptible to or diagnosed with a PRODH2-associated disorder.

### I. Definitions

[0071] In order that the present invention may be more readily understood, certain terms are first defined. In addition, it should be noted that whenever a value or range of values of a parameter are recited, it is intended that values and ranges intermediate to the recited values are also intended to be part of this invention.

[0072] The articles “a” and “an” are used herein to refer to one or to more than one (i.e., to at least one) of the grammatical object of the article. By way of example, “an element” means one element or more than one element, e.g., a plurality of elements.

[0073] The term “including” is used herein to mean, and is used interchangeably with, the phrase “including but not limited to”.

[0074] The term “or” is used herein to mean, and is used interchangeably with, the term “and/or,” unless context clearly indicates otherwise. For example, “sense strand or antisense strand” is understood as “sense strand or antisense strand or sense strand and antisense strand.”

[0075] The term “about” is used herein to mean within the typical ranges of tolerances in the art. For example, “about” can be understood as about 2 standard deviations from the mean. In certain embodiments, about means±10%. In certain embodiments, about means±5%. When about is present before a series of numbers or a range, it is understood that “about” can modify each of the numbers in the series or range.

[0076] The term “at least”, “no less than”, or “or more” prior to a number or series of numbers is understood to include the number adjacent to the term “at least”, and all subsequent numbers or integers that could logically be included, as clear from context. For example, the number of nucleotides in a nucleic acid molecule must be an integer. For example, “at least 19 nucleotides of a 21 nucleotide nucleic acid molecule” means that 19, 20, or 21 nucleotides have the indicated property. When at least is present before a series of numbers or a range, it is understood that “at least” can modify each of the numbers in the series or range.

[0077] As used herein, “no more than” or “or less” is understood as the value adjacent to the phrase and logical lower values or integers, as logical from context, to zero. For example, a duplex with an overhang of “no more than 2 nucleotides” has a 2, 1, or 0 nucleotide overhang. When “no more than” is present before a series of numbers or a range, it is understood that “no more than” can modify each of the numbers in the series or range. As used herein, ranges include both the upper and lower limit.

[0078] As used herein, methods of detection can include determination that the amount of analyte present is below the level of detection of the method.

[0079] In the event of a conflict between an indicated target site and the nucleotide sequence for a sense or antisense strand, the indicated sequence takes precedence.

[0080] In the event of a conflict between a sequence and its indicated site on a transcript or other sequence, the nucleotide sequence recited in the specification takes precedence.

[0081] As used herein, “proline dehydrogenase 2,” used interchangeably with the term “PRODH2,” refers to the enzyme which catalyzes the first step in the catabolism of trans-4-hydroxy-L-proline, an amino acid derivative obtained through food intake and collagen turnover. Glyoxylate is one of the downstream products of hydroxyproline catabolism, which in people with disorders of glyoxalate metabolism can lead to an increase in oxalate levels and the formation of calcium-oxalate kidney stones. PRODH2 is also known as proline dehydrogenase, HYPDH, HSPOX1, and hydroxyproline dehydrogenase.

[0082] The sequence of a human PRODH2 mRNA transcript can be found at, for example, GenBank Accession No. GI: 1818882103 (NM 021232.2; SEQ ID NO:1; reverse complement, SEQ ID NO: 2).

[0083] The sequence of mouse PRODH2 mRNA can be found at, for example, GenBank Accession No. GI: 142372879 (NM_019546.5; SEQ ID NO:3; reverse complement, SEQ ID NO: 4). The sequence of rat PRODH2 mRNA can be found at, for example, GenBank Accession No. GI: 198278487 (NM_001038588.1; SEQ ID NO:5; reverse complement, SEQ ID NO: 6). The sequence of Macaca fascicularis PRODH2 mRNA can be found at, for example, GenBank Accession No. GI: 982316449 (XM_005588902.2; SEQ ID NO: 7; reverse complement, SEQ ID NO: 8). The sequence of Macaca mulatta PRODH2 mRNA can be found at, for example, GenBank Accession No. GI: 1622893613 (XM_015123711.2; SEQ ID NO: 9; reverse complement, SEQ ID NO: 10).

[0084] Additional examples of PRODH2 mRNA sequences are readily available through publicly available databases, e.g., GenBank, UniProt, OMIM, and the Macaca genome project web site.

[0085] Further information on PRODH2 can be found, for example, at www.ncbi.nlm.nih.gov/gene/?term=PRODH2.

[0086] The entire contents of each of the foregoing GenBank Accession numbers and the Gene database numbers are incorporated herein by reference as of the date of filing this application.

[0087] The term PRODH2, as used herein, also refers to variations of the PRODH2 gene including variants provided in the SNP database. Numerous sequence variations within the PRODH2 gene have been identified and may be found at, for example, NCBI dbSNP and UniProt (see, e.g., www.ncbi.nlm.nih.gov/snp/?term=PRODH2, the entire contents of which is incorporated herein by reference as of the date of filing this application.

[0088] As used herein, “target sequence” refers to a contiguous portion of the nucleotide sequence of an mRNA molecule formed during the transcription of a PRODH2 gene, including mRNA that is a product of RNA processing of a primary transcription product. In one embodiment, the target portion of the sequence will be at least long enough to serve as a substrate for iRNA-directed cleavage at or near that portion of the nucleotide sequence of an mRNA molecule formed during the transcription of a PRODH2 gene.

[0089] The target sequence may be from about 19-36 nucleotides in length, e.g., about 19-30 nucleotides in length. For example, the target sequence can be about 19-30 nucleotides, 19-30, 19-29, 19-28, 19-27, 19-26, 19-25, 19-24, 19-23, 19-22, 19-21, 19-20, 20-30, 20-29, 20-28, 20-27, 20-26, 20-25, 20-24, 20-23, 20-22, 20-21, 21-30, 21-29, 21-28, 21-27, 21-26, 21-25, 21-24, 21-23, or 21-22 nucleotides in length. In certain embodiments, the target sequence is 19-23 nucleotides in length, optionally 21-23 nucleotides in length. Ranges and lengths intermediate to the above recited ranges and lengths are also contemplated to be part of the disclosure.

[0090] As used herein, the term “strand comprising a sequence” refers to an oligonucleotide comprising a chain of nucleotides that is described by the sequence referred to using the standard nucleotide nomenclature.

[0091] “G,” “C,” “A,” “T,” and “U” each generally stand for a nucleotide that contains guanine, cytosine, adenine, thymidine, and uracil as a base, respectively. However, it will be understood that the term “ribonucleotide” or “nucleotide” can also refer to a modified nucleotide, as further detailed below, or a surrogate replacement moiety (see, e.g., Table 1). The skilled person is well aware that guanine, cytosine, adenine, and uracil can be replaced by other moieties without substantially altering the base pairing properties of an oligonucleotide comprising a nucleotide bearing such replacement moiety. For example, without limitation, a nucleotide comprising inosine as its base can base pair with nucleotides containing adenine, cytosine, or uracil. Hence, nucleotides containing uracil, guanine, or adenine can be replaced in the nucleotide sequences of dsRNA featured in the invention by a nucleotide containing, for example, inosine. In another example, adenine and cytosine anywhere in the oligonucleotide can be replaced with guanine and uracil, respectively to form G-U Wobble base pairing with the target mRNA. Sequences containing such replacement moieties are suitable for the compositions and methods featured in the invention.

[0092] The terms “iRNA”, “RNAi agent,” “iRNA agent,”, “RNA interference agent” as used interchangeably herein, refer to an agent that contains RNA as that term is defined herein, and which mediates the targeted cleavage of an RNA transcript via an RNA-induced silencing complex (RISC) pathway. iRNA directs the sequence-specific degradation of mRNA through a process known as RNA interference (RNAi). The iRNA modulates, e.g., inhibits, the expression of a PRODH2 gene in a cell, e.g., a cell within a subject, such as a mammalian subject.

[0093] In one embodiment, an RNAi agent of the invention includes a single stranded RNA that interacts with a target RNA sequence, e.g., a PRODH2 target mRNA sequence, to direct the cleavage of the target RNA. Without wishing to be bound by theory it is believed that long double stranded RNA introduced into cells is broken down into siRNA by a Type III endonuclease known as Dicer (Sharp et al. (2001) Genes Dev. 15:485). Dicer, a ribonuclease-III-like enzyme, processes the dsRNA into 19-23 base pair short interfering RNAs with characteristic two base 3′ overhangs (Bernstein, et al., (2001) Nature 409:363). The siRNAs are then incorporated into an RNA-induced silencing complex (RISC) where one or more helicases unwind the siRNA duplex, enabling the complementary antisense strand to guide target recognition (Nykanen, et al., (2001) Cell 107:309). Upon binding to the appropriate target mRNA, one or more endonucleases within the RISC cleave the target to induce silencing (Elbashir, et al., (2001) Genes Dev. 15:188). Thus, in one aspect the invention relates to a single stranded RNA (siRNA) generated within a cell and which promotes the formation of a RISC complex to effect silencing of the target gene, i.e., a PRODH2 gene. Accordingly, the term “siRNA” is also used herein to refer to an iRNA as described above.

[0094] In certain embodiments, the RNAi agent may be a single-stranded siRNA (ssRNAi) that is introduced into a cell or organism to inhibit a target mRNA. Single-stranded RNAi agents bind to the RISC endonuclease, Argonaute 2, which then cleaves the target mRNA. The single-stranded siRNAs are generally 15-30 nucleotides and are chemically modified. The design and testing of single-stranded siRNAs are described in U.S. Pat. No. 8,101,348 and in Lima et al., (2012) Cell 150:883-894, the entire contents of each of which are hereby incorporated herein by reference. Any of the antisense nucleotide sequences described herein may be used as a single-stranded siRNA as described herein or as chemically modified by the methods described in Lima et al., (2012) Cell 150:883-894.

[0095] In certain embodiments, an “iRNA” for use in the compositions, uses, and methods of the invention is a double stranded RNA and is referred to herein as a “double stranded RNA agent,” “double stranded RNA (dsRNA) molecule,” “dsRNA agent,” or “dsRNA”. The term “dsRNA”, refers to a complex of ribonucleic acid molecules, having a duplex structure comprising two anti-parallel and substantially complementary nucleic acid strands, referred to as having “sense” and “antisense” orientations with respect to a target RNA, i.e., a PRODH2 gene. In some embodiments of the invention, a double stranded RNA (dsRNA) triggers the degradation of a target RNA, e.g., an mRNA, through a post-transcriptional gene-silencing mechanism referred to herein as RNA interference or RNAi.

[0096] In general, the majority of nucleotides of each strand of a dsRNA molecule are ribonucleotides, but as described in detail herein, each or both strands can also include one or more non-ribonucleotides, e.g., a deoxyribonucleotide or a modified nucleotide. In addition, as used in this specification, an “iRNA” may include ribonucleotides with chemical modifications; an iRNA may include substantial modifications at multiple nucleotides. As used herein, the term “modified nucleotide” refers to a nucleotide having, independently, a modified sugar moiety, a modified internucleotide linkage, or modified nucleobase, or any combination thereof. Thus, the term modified nucleotide encompasses substitutions, additions or removal of, e.g., a functional group or atom, to internucleoside linkages, sugar moieties, or nucleobases. The modifications suitable for use in the agents of the invention include all types of modifications disclosed herein or known in the art. Any such modifications, as used in a siRNA type molecule, are encompassed by “iRNA” or “RNAi agent” for the purposes of this specification and claims.

[0097] In certain embodiments of the instant disclosure, inclusion of a deoxy-nucleotide if present within an RNAi agent can be considered to constitute a modified nucleotide.

[0098] The duplex region may be of any length that permits specific degradation of a desired target RNA through a RISC pathway, and may range from about 19 to 36 base pairs in length, e.g., about 19-30 base pairs in length, for example, about 9, 10, 11, 12, 13, 14, 15, 16, 17, 18, 19, 20, 21, 22, 23, 24, 25, 26, 27, 28, 29, 30, 31, 32, 33, 34, 35, or 36 base pairs in length, such as about 19-30, 19-29, 19-28, 19-27, 19-26, 19-25, 19-24, 19-23, 19-22, 19-21, 19-20, 20-30, 20-29, 20-28, 20-27, 20-26, 20-25, 20-24, 20-23, 20-22, 20-21, 21-30, 21-29, 21-28, 21-27, 21-26, 21-25, 21-24, 21-23, or 21-22 base pairs in length. In certain embodiments, the duplex region is 19-21 base pairs in length, e.g., 21 base pairs in length. Ranges and lengths intermediate to the above recited ranges and lengths are also contemplated to be part of the disclosure.

[0099] The two strands forming the duplex structure may be different portions of one larger RNA molecule, or they may be separate RNA molecules. Where the two strands are part of one larger molecule, and therefore are connected by an uninterrupted chain of nucleotides between the 3′-end of one strand and the 5′-end of the respective other strand forming the duplex structure, the connecting RNA chain is referred to as a “hairpin loop.” A hairpin loop can comprise at least one unpaired nucleotide. In some embodiments, the hairpin loop can comprise at least 2, 3, 4, 5, 6, 7, 8, 9, 10, 20, 23 or more unpaired nucleotides. In some embodiments, the hairpin loop can be 10 or fewer nucleotides. In some embodiments, the hairpin loop can be 8 or fewer unpaired nucleotides. In some embodiments, the hairpin loop can be 4-10 unpaired nucleotides. In some embodiments, the hairpin loop can be 4-8 nucleotides.

[0100] Where the two substantially complementary strands of a dsRNA are comprised by separate RNA molecules, those molecules need not be, but can be covalently connected. Where the two strands are connected covalently by means other than an uninterrupted chain of nucleotides between the 3′-end of one strand and the 5′-end of the respective other strand forming the duplex structure, the connecting structure is referred to as a “linker.” The RNA strands may have the same or a different number of nucleotides. The maximum number of base pairs is the number of nucleotides in the shortest strand of the dsRNA minus any overhangs that are present in the duplex. In addition to the duplex structure, an RNAi may comprise one or more nucleotide overhangs. In one embodiment of the RNAi agent, at least one strand comprises a 3′ overhang of at least 1 nucleotide. In another embodiment, at least one strand comprises a 3′ overhang of at least 2 nucleotides, e.g., 2, 3, 4, 5, 6, 7, 9, 10, 11, 12, 13, 14, or 15 nucleotides. In other embodiments, at least one strand of the RNAi agent comprises a 5′ overhang of at least 1 nucleotide. In certain embodiments, at least one strand comprises a 5′ overhang of at least 2 nucleotides, e.g., 2, 3, 4, 5, 6, 7, 9, 10, 11, 12, 13, 14, or 15 nucleotides. In still other embodiments, both the 3′ and the 5′ end of one strand of the RNAi agent comprise an overhang of at least 1 nucleotide.

[0101] In certain embodiments, an iRNA agent of the invention is a dsRNA, each strand of which comprises 19-23 nucleotides, that interacts with a target RNA sequence, e.g., a PRODH2 gene, to direct cleavage of the target RNA.

[0102] In some embodiments, an iRNA of the invention is a dsRNA of 24-30 nucleotides that interacts with a target RNA sequence, e.g., a PRODH2 target mRNA sequence, to direct the cleavage of the target RNA.

[0103] As used herein, the term “nucleotide overhang” refers to at least one unpaired nucleotide that protrudes from the duplex structure of a double stranded iRNA. For example, when a 3-end of one strand of a dsRNA extends beyond the 5-end of the other strand, or vice versa, there is a nucleotide overhang. A dsRNA can comprise an overhang of at least one nucleotide; alternatively the overhang can comprise at least two nucleotides, at least three nucleotides, at least four nucleotides, at least five nucleotides or more. A nucleotide overhang can comprise or consist of a nucleotide/nucleoside analog, including a deoxynucleotide/nucleoside. The overhang(s) can be on the sense strand, the antisense strand, or any combination thereof. Furthermore, the nucleotide(s) of an overhang can be present on the 5-end, 3-end, or both ends of either an antisense or sense strand of a dsRNA.

[0104] In one embodiment, the antisense strand of a dsRNA has a 1-10 nucleotide, e.g., a 1, 2, 3, 4, 5, 6, 7, 8, 9, or 10 nucleotide, overhang at the 3′-end or the 5′-end. In one embodiment, the sense strand of a dsRNA has a 1-10 nucleotide, e.g., a 1, 2, 3, 4, 5, 6, 7, 8, 9, or 10 nucleotide, overhang at the 3′-end or the 5′-end. In another embodiment, one or more of the nucleotides in the overhang is replaced with a nucleoside thiophosphate.

[0105] In certain embodiments, the antisense strand of a dsRNA has a 1-10 nucleotide, e.g., 0-3, 1-3, 2-4, 2-5, 4-10, 5-10, e.g., a 1, 2, 3, 4, 5, 6, 7, 8, 9, or 10 nucleotide, overhang at the 3′-end or the 5′-end. In one embodiment, the sense strand of a dsRNA has a 1-10 nucleotide, e.g., a 1, 2, 3, 4, 5, 6, 7, 8, 9, or 10 nucleotide, overhang at the 3′-end or the 5′-end. In another embodiment, one or more of the nucleotides in the overhang is replaced with a nucleoside thiophosphate.

[0106] In certain embodiments, the antisense strand of a dsRNA has a 1-10 nucleotides, e.g., a 1, 2, 3, 4, 5, 6, 7, 8, 9, or 10 nucleotide, overhang at the 3′-end or the 5′-end. In certain embodiments, the overhang on the sense strand or the antisense strand, or both, can include extended lengths longer than 10 nucleotides, e.g., 1-30 nucleotides, 2-30 nucleotides, 10-30 nucleotides, 10-25 nucleotides, 10-20 nucleotides, or 10-15 nucleotides in length. In certain embodiments, an extended overhang is on the sense strand of the duplex. In certain embodiments, an extended overhang is present on the 3′ end of the sense strand of the duplex. In certain embodiments, an extended overhang is present on the 5′ end of the sense strand of the duplex. In certain embodiments, an extended overhang is on the antisense strand of the duplex. In certain embodiments, an extended overhang is present on the 3′ end of the antisense strand of the duplex. In certain embodiments, an extended overhang is present on the 5′ end of the antisense strand of the duplex. In certain embodiments, one or more of the nucleotides in the extended overhang is replaced with a nucleoside thiophosphate. In certain embodiments, the overhang includes a self-complementary portion such that the overhang is capable of forming a hairpin structure that is stable under physiological conditions.

[0107] “Blunt” or “blunt end” means that there are no unpaired nucleotides at that end of the double stranded RNA agent, i.e., no nucleotide overhang. A “blunt ended” double stranded RNA agent is double stranded over its entire length, i.e., no nucleotide overhang at either end of the molecule. The RNAi agents of the invention include RNAi agents with no nucleotide overhang at one end (i.e., agents with one overhang and one blunt end) or with no nucleotide overhangs at either end. Most often such a molecule will be double-stranded over its entire length.

[0108] The term “antisense strand” or “guide strand” refers to the strand of an iRNA, e.g., a dsRNA, which includes a region that is substantially complementary to a target sequence, e.g., a PRODH2 mRNA.

[0109] As used herein, the term “region of complementarity” refers to the region on the antisense strand that is substantially complementary to a sequence, for example a target sequence, e.g., a PRODH2 nucleotide sequence, as defined herein. Where the region of complementarity is not fully complementary to the target sequence, the mismatches can be in the internal or terminal regions of the molecule. Generally, the most tolerated mismatches are in the terminal regions, e.g., within 5, 4, or 3 nucleotides of the 5′- or 3′-end of the iRNA. In some embodiments, a double stranded RNA agent of the invention includes a nucleotide mismatch in the antisense strand. In some embodiments, the antisense strand of the double stranded RNA agent of the invention includes no more than 4 mismatches with the target mRNA, e.g., the antisense strand includes 4, 3, 2, 1, or 0 mismatches with the target mRNA. In some embodiments, the antisense strand double stranded RNA agent of the invention includes no more than 4 mismatches with the sense strand, e.g., the antisense strand includes 4, 3, 2, 1, or 0 mismatches with the sense strand. In some embodiments, a double stranded RNA agent of the invention includes a nucleotide mismatch in the sense strand. In some embodiments, the sense strand of the double stranded RNA agent of the invention includes no more than 4 mismatches with the antisense strand, e.g., the sense strand includes 4, 3, 2, 1, or 0 mismatches with the antisense strand. In some embodiments, the nucleotide mismatch is, for example, within 5, 4, 3 nucleotides from the 3′-end of the iRNA. In another embodiment, the nucleotide mismatch is, for example, in the 3′-terminal nucleotide of the iRNA agent. In some embodiments, the mismatch(s) is not in the seed region.

[0110] Thus, an RNAi agent as described herein can contain one or more mismatches to the target sequence. In one embodiment, an RNAi agent as described herein contains no more than 3 mismatches (i.e., 3, 2, 1, or 0 mismatches). In one embodiment, an RNAi agent as described herein contains no more than 2 mismatches. In one embodiment, an RNAi agent as described herein contains no more than 1 mismatch. In one embodiment, an RNAi agent as described herein contains 0 mismatches. In certain embodiments, if the antisense strand of the RNAi agent contains mismatches to the target sequence, the mismatch can optionally be restricted to be within the last 5 nucleotides from either the 5′- or 3′-end of the region of complementarity. For example, in such embodiments, for a 23 nucleotide RNAi agent, the strand which is complementary to a region of a PRODH2 gene, generally does not contain any mismatch within the central 13 nucleotides. The methods described herein or methods known in the art can be used to determine whether an RNAi agent containing a mismatch to a target sequence is effective in inhibiting the expression of a PRODH2 gene. Consideration of the efficacy of RNAi agents with mismatches in inhibiting expression of a PRODH2 gene is important, especially if the particular region of complementarity in a PRODH2 gene is known to have polymorphic sequence variation within the population.

[0111] The term “sense strand” or “passenger strand” as used herein, refers to the strand of an iRNA that includes a region that is substantially complementary to a region of the antisense strand as that term is defined herein.

[0112] As used herein, “substantially all of the nucleotides are modified” are largely but not wholly modified and can include not more than 5, 4, 3, 2, or 1 unmodified nucleotides.

[0113] As used herein, the term “cleavage region” refers to a region that is located immediately adjacent to the cleavage site. The cleavage site is the site on the target at which cleavage occurs. In some embodiments, the cleavage region comprises three bases on either end of, and immediately adjacent to, the cleavage site. In some embodiments, the cleavage region comprises two bases on either end of, and immediately adjacent to, the cleavage site. In some embodiments, the cleavage site specifically occurs at the site bound by nucleotides 10 and 11 of the antisense strand, and the cleavage region comprises nucleotides 11, 12 and 13.

[0114] As used herein, and unless otherwise indicated, the term “complementary,” when used to describe a first nucleotide sequence in relation to a second nucleotide sequence, refers to the ability of an oligonucleotide or polynucleotide comprising the first nucleotide sequence to hybridize and form a duplex structure under certain conditions with an oligonucleotide or polynucleotide comprising the second nucleotide sequence, as will be understood by the skilled person. Such conditions can, for example, be stringent conditions, where stringent conditions can include: 400 mM NaCl, 40 mM PIPES pH 6.4, 1 mM EDTA, 50° C. or 70° C. for 12-16 hours followed by washing (see, e.g., “Molecular Cloning: A Laboratory Manual, Sambrook, et al. (1989) Cold Spring Harbor Laboratory Press). Other conditions, such as physiologically relevant conditions as can be encountered inside an organism, can apply. The skilled person will be able to determine the set of conditions most appropriate for a test of complementarity of two sequences in accordance with the ultimate application of the hybridized nucleotides.

[0115] Complementary sequences within an iRNA, e.g., within a dsRNA as described herein, include base-pairing of the oligonucleotide or polynucleotide comprising a first nucleotide sequence to an oligonucleotide or polynucleotide comprising a second nucleotide sequence over the entire length of one or both nucleotide sequences. Such sequences can be referred to as “fully complementary” with respect to each other herein. However, where a first sequence is referred to as “substantially complementary” with respect to a second sequence herein, the two sequences can be fully complementary, or they can form one or more, but generally not more than 5, 4, 3, or 2 mismatched base pairs upon hybridization for a duplex up to 30 base pairs, while retaining the ability to hybridize under the conditions most relevant to their ultimate application, e.g., inhibition of gene expression, in vitro or in vivo. However, where two oligonucleotides are designed to form, upon hybridization, one or more single stranded overhangs, such overhangs shall not be regarded as mismatches with regard to the determination of complementarity. For example, a dsRNA comprising one oligonucleotide 21 nucleotides in length and another oligonucleotide 23 nucleotides in length, wherein the longer oligonucleotide comprises a sequence of 21 nucleotides that is fully complementary to the shorter oligonucleotide, can yet be referred to as “fully complementary” for the purposes described herein.

[0116] “Complementary” sequences, as used herein, can also include, or be formed entirely from, non-Watson-Crick base pairs or base pairs formed from non-natural and modified nucleotides, in so far as the above requirements with respect to their ability to hybridize are fulfilled. Such non-Watson-Crick base pairs include, but are not limited to, G:U Wobble or Hoogsteen base pairing.

[0117] The terms “complementary,” “fully complementary” and “substantially complementary” herein can be used with respect to the base matching between the sense strand and the antisense strand of a dsRNA, or between two oligonucletoides or polynucleotides, such as the antisense strand of a double stranded RNA agent and a target sequence, as will be understood from the context of their use.

[0118] As used herein, a polynucleotide that is “substantially complementary to at least part of” a messenger RNA (mRNA) refers to a polynucleotide that is substantially complementary to a contiguous portion of the mRNA of interest (e.g., an mRNA encoding a PRODH2 gene). For example, a polynucleotide is complementary to at least a part of a PRODH2 mRNA if the sequence is substantially complementary to a non-interrupted portion of an mRNA encoding a PRODH2 gene.

[0119] Accordingly, in some embodiments, the antisense polynucleotides disclosed herein are fully complementary to the target PRODH2 sequence. In other embodiments, the antisense polynucleotides disclosed herein are substantially complementary to the target PRODH2 sequence and comprise a contiguous nucleotide sequence which is at least 80% complementary over its entire length to the equivalent region of the nucleotide sequence of any one of SEQ ID NOs:1, 3, 5, 7, or 9, or a fragment of any one of SEQ ID NOs:1, 3, 5, 7, or 9, such as about 85%, about 90%, about 91%, about 92%, about 93%, about 94%, about 95%, about 96%, about 97%, about 98%, or about 99% complementary.

[0120] In other embodiments, the antisense polynucleotides disclosed herein are substantially complementary to the target PRODH2 sequence and comprise a contiguous nucleotide sequence which is at least about 80% complementary over its entire length to any one of the sense strand nucleotide sequences in any one of any one of Tables 2-3, or a fragment of any one of the sense strand nucleotide sequences in any one of Tables 2-3, such as about 85%, about 90%, about 91%, about 92%, about 93%, about 94%, about 95%, about 96%, about 97%, about 98%, about 99%, or 100% complementary.

[0121] In one embodiment, an RNAi agent of the disclosure includes a sense strand that is substantially complementary to an antisense polynucleotide which, in turn, is the same as a target PRODH2 sequence, and wherein the sense strand polynucleotide comprises a contiguous nucleotide sequence which is at least about 80% complementary over its entire length to the equivalent region of the nucleotide sequence of SEQ ID NOs: 2, 4, 6, 8, or 10, or a fragment of any one of SEQ ID NOs:2, 4, 6, 8, or 10, such as about 85%, about 90%, about 91%, about 92%, about 93%, about 94%, about 95%, about 96%, about 97%, about 98%, about 99%, or 100% complementary.

[0122] In some embodiments, an iRNA of the invention includes a sense strand that is substantially complementary to an antisense polynucleotide which, in turn, is complementary to a target PRODH2 sequence, and wherein the sense strand polynucleotide comprises a contiguous nucleotide sequence which is at least about 80% complementary over its entire length to any one of the antisense strand nucleotide sequences in any one of any one of Tables 2-3, or a fragment of any one of the antisense strand nucleotide sequences in any one of Tables 2-3, such as about 85%, about 90%, about 91%, about 92%, about 93%, about 94%, about 95%, about 96%, about 97%, about 98%, about 99%, or 100% complementary.

[0123] In general, an “iRNA” includes ribonucleotides with chemical modifications. Such modifications may include all types of modifications disclosed herein or known in the art. Any such modifications, as used in a dsRNA molecule, are encompassed by “iRNA” for the purposes of this specification and claims.

[0124] In certain embodiments of the instant disclosure, inclusion of a deoxy-nucleotide if present within an RNAi agent can be considered to constitute a modified nucleotide.

[0125] In an aspect of the invention, an agent for use in the methods and compositions of the invention is a single-stranded antisense oligonucleotide molecule that inhibits a target mRNA via an antisense inhibition mechanism. The single-stranded antisense oligonucleotide molecule is complementary to a sequence within the target mRNA. The single-stranded antisense oligonucleotides can inhibit translation in a stoichiometric manner by base pairing to the mRNA and physically obstructing the translation machinery, see Dias, N. et al., (2002) Mol Cancer Ther 1:347-355. The single-stranded antisense oligonucleotide molecule may be about 14 to about 30 nucleotides in length and have a sequence that is complementary to a target sequence. For example, the single-stranded antisense oligonucleotide molecule may comprise a sequence that is at least about 14, 15, 16, 17, 18, 19, 20, or more contiguous nucleotides from any one of the antisense sequences described herein.

[0126] The phrase “contacting a cell with an iRNA,” such as a dsRNA, as used herein, includes contacting a cell by any possible means. Contacting a cell with an iRNA includes contacting a cell in vitro with the iRNA or contacting a cell in vivo with the iRNA. The contacting may be done directly or indirectly. Thus, for example, the iRNA may be put into physical contact with the cell by the individual performing the method, or alternatively, the iRNA may be put into a situation that will permit or cause it to subsequently come into contact with the cell.

[0127] Contacting a cell in vitro may be done, for example, by incubating the cell with the iRNA. Contacting a cell in vivo may be done, for example, by injecting the iRNA into or near the tissue where the cell is located, or by injecting the iRNA into another area, e.g., the bloodstream or the subcutaneous space, such that the agent will subsequently reach the tissue where the cell to be contacted is located. For example, the iRNA may contain or be coupled to a ligand, e.g., GalNAc, that directs the iRNA to a site of interest, e.g., the liver. Combinations of in vitro and in vivo methods of contacting are also possible. For example, a cell may also be contacted in vitro with an iRNA and subsequently transplanted into a subject.

[0128] In certain embodiments, contacting a cell with an iRNA includes “introducing” or “delivering the iRNA into the cell” by facilitating or effecting uptake or absorption into the cell. Absorption or uptake of an iRNA can occur through unaided diffusion or active cellular processes, or by auxiliary agents or devices. Introducing an iRNA into a cell may be in vitro or in vivo. For example, for in vivo introduction, iRNA can be injected into a tissue site or administered systemically. In vitro introduction into a cell includes methods known in the art such as electroporation and lipofection. Further approaches are described herein below or are known in the art.

[0129] The term “lipid nanoparticle” or “LNP” is a vesicle comprising a lipid layer encapsulating a pharmaceutically active molecule, such as a nucleic acid molecule, e.g., an iRNA or a plasmid from which an iRNA is transcribed. LNPs are described in, for example, U.S. Pat. Nos. 6,858,225, 6,815,432, 8,158,601, and 8,058,069, the entire contents of which are hereby incorporated herein by reference.

[0130] As used herein, a “subject” is an animal, such as a mammal, including a primate (such as a human, a non-human primate, e.g., a monkey, and a chimpanzee), a non-primate (such as a cow, a pig, a horse, a goat, a rabbit, a sheep, a hamster, a guinea pig, a cat, a dog, a rat, or a mouse), or a bird that expresses the target gene, either endogenously or heterologously. In an embodiment, the subject is a human, such as a human being treated or assessed for a disease or disorder that would benefit from reduction in PRODH2 expression; a human at risk for a disease or disorder that would benefit from reduction in PRODH2 expression; a human having a disease or disorder that would benefit from reduction in PRODH2 expression; or human being treated for a disease or disorder that would benefit from reduction in PRODH2 expression as described herein. In some embodiments, the subject is a female human. In other embodiments, the subject is a male human. In one embodiment, the subject is an adult subject. In another embodiment, the subject is a pediatric subject.

[0131] As used herein, the terms “treating” or “treatment” refer to a beneficial or desired result, such as reducing at least one sign or symptom of a PRODH2-associated disorder in a subject. Treatment also includes a reduction of one or more sign or symptoms associated with unwanted PRODH2 expression; diminishing the extent of unwanted PRODH2 activation or stabilization; amelioration or palliation of unwanted PRODH2 activation or stabilization. “Treatment” can also mean prolonging survival as compared to expected survival in the absence of treatment. The term “lower” in the context of the level of PRODH2 in a subject or a disease marker or symptom refers to a statistically significant decrease in such level. The decrease can be, for example, at least 10%, 15%, 20%, 25%, 30%, %, 40%, 45%, 50%, 55%, 60%, 65%, 70%, 75%, 80%, 85%, 90%, 95%, or more. In certain embodiments, a decrease is at least 20%. In certain embodiments, the decrease is at least 50% in a disease marker, e.g., protein or gene expression level. “Lower” in the context of the level of PRODH2 in a subject is a decrease to a level accepted as within the range of normal for an individual without such disorder. In certain embodiments, “lower” is the decrease in the difference between the level of a marker or symptom for a subject suffering from a disease and a level accepted within the range of normal for an individual, e.g., the level of decrease in bodyweight between an obese individual and an individual having a weight accepted within the range of normal.

[0132] As used herein, “prevention” or “preventing,” when used in reference to a disease, disorder or condition thereof, may be treated or ameliorated by a reduction in expression of a PRODH2 gene, refers to a reduction in the likelihood that a subject will develop a symptom associated with such a disease, disorder, or condition, e.g., a symptom of unwanted or excessive PRODH2 expression, such as stone formation or elevated urinary glyoxylate, oxalate and/or glycolate levels. The likelihood of developing stone formation is reduced, for example, when an individual having one or more risk factors for stone formation either fails to develop stones or develops stones with less severity relative to a population having the same risk factors and not receiving treatment as described herein. The failure to develop a disease, disorder or condition, or the reduction in the development of a symptom associated with such a disease, disorder or condition (e.g., by at least about 10% on a clinically accepted scale for that disease or disorder), or the exhibition of delayed symptoms delayed (e.g., by days, weeks, months or years) is considered effective prevention.

[0133] As used herein, the term “Proline dehydrogenase 2-associated disease” or “PRODH2-associated disease,” is a disease or disorder that is caused by, or associated with PRODH2 gene expression or PRODH2 protein production. The term “PRODH2-associated disease” includes a disease, disorder or condition that would benefit from a decrease in PRODH2 gene expression, replication, or protein activity. In some embodiments, the PRODH2-associated disease is a disorder associated with high urinary glyoxylate, oxalate and/or glycolate levels. In some embodiments, the PRODH2-associated disease is a disorder associated with stone formation, e.g., a kidney stone disease.

[0134] In some embodiments, a PRODH2-associated disorder is primary hyperoxaluria.

[0135] Primary hyperoxaluria is a metabolic disorder characterized by impaired glyoxylate metabolism resulting in an increase in endogenous oxalate synthesis and the formation of calcium-oxalate kidney stones. Over time, progressive renal inflammation and interstitial fibrosis from progressive nephrocalcinosis, recurrent urolithiasis, and secondary complications, such as urinary tract infections, can cause decreased renal function, systemic oxalate deposition, and end-stage renal failure. There are three types of primary hyperoxaluria that differ in their severity and genetic cause.

[0136] Primary hyperoxaluria type 1 (PH1) results from mutation in peroxisomal alanine:glyoxylate aminotransferase (Danpure C J, et al., FEBS Lett. 1986 May 26; 201(1):20-4). In PH1, kidney stones typically begin to appear anytime from childhood to early adulthood, and end stage renal disease can develop at any age. Primary hyperoxaluria type 2 (PH2) is similar to type 1, but PH2 results from mutations in glyoxylate reductase, and end stage renal disease develops later in life (Giafi C F, et al., Ann Clin Biochem. 1998 January; 35 (Pt 1)( ):104-9). Primary hyperoxaluria type 3 (PH3) results from inactivating mutations in 4-hydroxy-2-oxoglutarate aldolase (Belostotsky R, et al., Am J Hum Genet. 2010 Sep. 10; 87(3):392-9). In PH3, affected individuals often develop kidney stones in early childhood, but few cases of this type have been described so additional signs and symptoms of this type are unclear.

[0137] In some embodiments, a PRODH2-associated disorder is primary hyperoxaluria type 1. In some embodiments, a PRODH2-associated disorder is primary hyperoxaluria type 2. In some embodiments, a PRODH2-associated disorder is primary hyperoxaluria type 3.

[0138] In some embodiments, the PRODH2-associated disease is a kidney stone disease.

[0139] As used herein, the term “kidney stone disease” refers to a disease in which kidney stones (also called renal stones or urinary stones) form in one or both kidneys of the subject. Kidney stones are small, hard deposits which are made up of minerals or other compounds found in urine. Kidney stones vary in size, shape, and color. To be cleared from the body (or “passed”), the stones need to travel through ducts that carry urine from the kidneys to the bladder (ureters) and be excreted.

[0140] Depending on their size, kidney stones generally take days to weeks to pass out of the body. There are four main types of kidney stones which are classified by the material they are made of. Up to 75 percent of all kidney stones are composed primarily of calcium. Stones can also be made up of uric acid (a normal waste product), cystine (a protein building block), or struvite (a phosphate mineral).

[0141] Stones form when there is more of the compound in the urine than can be dissolved. This imbalance can occur when there is an increased amount of the material in the urine, a reduced amount of liquid urine, or a combination of both. People are most likely to develop kidney stones between ages 40 and 60, though the stones can appear at any age. Research shows that 35 to 50 percent of people who have one kidney stone will develop additional stones, usually within 10 years of the first stone.

[0142] In one embodiment, the kidney stone disease is a calcium oxalate kidney stone disease. In another embodiment, the kidney stone disease is a non-calcium oxalate kidney stone disease.

[0143] In some embodiments, the kidney stone disease (either calcium oxalate kidney stone disease or non-calcium oxalate kidney stone disease) is non-recurrent kidney stone disease. In other embodiments, the kidney stone disease (either calcium oxalate kidney stone disease or non-calcium oxalate kidney stone disease) is recurrent kidney stone disease.

[0144] As used herein, the term “non-recurrent kidney stone disease” refers to kidney stone disease newly diagnosed in a subject, i.e., the subject was not previously diagnosed as having had kidney stone disease.

[0145] As used herein, the term “recurrent kidney stone disease” refers to kidney stone disease that returns in a subject that previously had kidney stone disease and was successfully treated for the disease (e.g., surgically treated to remove the kidney stone) or passed a kidney stone. Recurrent kidney stone disease may return at any time interval following treatment of the subject for kidney stone disease. In one embodiment, a subject having recurrent kidney stone disease is a subject that had at least two hospital admissions for kidney stone disease that were at least 90 days apart.

[0146] “Therapeutically effective amount,” as used herein, is intended to include the amount of an RNAi agent that, when administered to a subject having a PRODH2-associated disease, is sufficient to effect treatment of the disease (e.g., by diminishing, ameliorating, or maintaining the existing disease or one or more symptoms of disease). The “therapeutically effective amount” may vary depending on the RNAi agent, how the agent is administered, the disease and its severity and the history, age, weight, family history, genetic makeup, the types of preceding or concomitant treatments, if any, and other individual characteristics of the subject to be treated.

[0147] “Prophylactically effective amount,” as used herein, is intended to include the amount of an RNAi agent that, when administered to a subject having a PRODH2-associated disorder, is sufficient to prevent or ameliorate the disease or one or more symptoms of the disease. Ameliorating the disease includes slowing the course of the disease or reducing the severity of later-developing disease. The “prophylactically effective amount” may vary depending on the RNAi agent, how the agent is administered, the degree of risk of disease, and the history, age, weight, family history, genetic makeup, the types of preceding or concomitant treatments, if any, and other individual characteristics of the patient to be treated.

[0148] A “therapeutically-effective amount” or “prophylactically effective amount” also includes an amount of an RNAi agent that produces some desired effect at a reasonable benefit/risk ratio applicable to any treatment. The iRNA employed in the methods of the present invention may be administered in a sufficient amount to produce a reasonable benefit/risk ratio applicable to such treatment.

[0149] The phrase “pharmaceutically acceptable” is employed herein to refer to those compounds, materials (including salts), compositions, or dosage forms which are, within the scope of sound medical judgment, suitable for use in contact with the tissues of human subjects and animal subjects without excessive toxicity, irritation, allergic response, or other problem or complication, commensurate with a reasonable benefit/risk ratio.

[0150] The phrase “pharmaceutically-acceptable carrier” as used herein means a pharmaceutically-acceptable material, composition, or vehicle, such as a liquid or solid filler, diluent, excipient, manufacturing aid (e.g., lubricant, talc magnesium, calcium or zinc stearate, or steric acid), or solvent encapsulating material, involved in carrying or transporting the subject compound from one organ, or portion of the body, to another organ, or portion of the body. Each carrier must be “acceptable” in the sense of being compatible with the other ingredients of the formulation and not injurious to the subject being treated. Such carriers are known in the art. Pharmaceutically acceptable carriers include carriers for administration by injection.

[0151] The term “sample,” as used herein, includes a collection of similar fluids, cells, or tissues isolated from a subject, as well as fluids, cells, or tissues present within a subject. Examples of biological fluids include blood, serum and serosal fluids, plasma, cerebrospinal fluid, ocular fluids, lymph, urine, saliva, and the like. Tissue samples may include samples from tissues, organs, or localized regions. For example, samples may be derived from particular organs, parts of organs, or fluids or cells within those organs. In certain embodiments, samples may be derived from the liver (e.g., whole liver or certain segments of liver or certain types of cells in the liver, such as, e.g., hepatocytes). In some embodiments, a “sample derived from a subject” refers to urine obtained from the subject. A “sample derived from a subject” can refer to blood or blood derived serum or plasma from the subject.

### II. iRNAs of the Invention

[0152] The present invention provides iRNAs which inhibit the expression of a PRODH2 gene. In certain embodiments, the iRNA includes double stranded ribonucleic acid (dsRNA) molecules for inhibiting the expression of a PRODH2 gene in a cell, such as a cell within a subject, e.g., a mammal, such as a human susceptible to developing a PRODH2-associated disorder, e.g., primary hyperoxaluria and/or kidney stone diseases. The dsRNAi agent includes an antisense strand having a region of complementarity which is complementary to at least a part of an mRNA formed in the expression of a PRODH2 gene. The region of complementarity is about 19-30 nucleotides in length (e.g., about 30, 29, 28, 27, 26, 25, 24, 23, 22, 21, 20, or 19 nucleotides in length).

[0153] Upon contact with a cell expressing the PRODH2 gene, the iRNA inhibits the expression of the PRODH2 gene (e.g., a human, a primate, a non-primate, or a rat PRODH2 gene) by at least about 50% as assayed by, for example, a PCR or branched DNA (bDNA)-based method, or by a protein-based method, such as by immunofluorescence analysis, using, for example, western blotting or flow cytometric techniques. In certain embodiments, inhibition of expression is determined by the qPCR method provided in the examples herein with the siRNA at, e.g., a 10 nM concentration, in an appropriate organism cell line provided therein. In certain embodiments, inhibition of expression in vivo is determined by knockdown of the human gene in a rodent expressing the human gene, e.g., a mouse or an AAV-infected mouse expressing the human target gene, e.g., when administered as single dose, e.g., at 3 mg/kg at the nadir of RNA expression.

[0154] A dsRNA includes two RNA strands that are complementary and hybridize to form a duplex structure under conditions in which the dsRNA will be used. One strand of a dsRNA (the antisense strand) includes a region of complementarity that is substantially complementary, and generally fully complementary, to a target sequence. The target sequence can be derived from the sequence of an mRNA formed during the expression of a PRODH2 gene. The other strand (the sense strand) includes a region that is complementary to the antisense strand, such that the two strands hybridize and form a duplex structure when combined under suitable conditions. As described elsewhere herein and as known in the art, the complementary sequences of a dsRNA can also be contained as self-complementary regions of a single nucleic acid molecule, as opposed to being on separate oligonucleotides.

[0155] Generally, the duplex structure is 15 to 30 base pairs in length, e.g., 15-29, 15-28, 15-27, 15-26, 15-25, 15-24, 15-23, 15-22, 15-21, 15-20, 15-19, 15-18, 15-17, 18-30, 18-29, 18-28, 18-27, 18-26, 18-25, 18-24, 18-23, 18-22, 18-21, 18-20, 19-30, 19-29, 19-28, 19-27, 19-26, 19-25, 19-24, 19-23, 19-22, 19-21, 19-20, 20-30, 20-29, 20-28, 20-27, 20-26, 20-25, 20-24, 20-23, 20-22, 20-21, 21-30, 21-29, 21-28, 21-27, 21-26, 21-25, 21-24, 21-23, or 21-22 base pairs in length. In certain embodiments, the duplex structure is 18 to 25 base pairs in length, e.g., 18-25, 18-24, 18-23, 18-22, 18-21, 18-20, 19-25, 19-24, 19-23, 19-22, 19-21, 19-20, 20-25, 20-24, 20-23, 20-22, 20-21, 21-25, 21-24, 21-23, 21-22, 22-25, 22-24, 22-23, 23-25, 23-24 or 24-25 base pairs in length, for example, 19-21 basepairs in length. Ranges and lengths intermediate to the above recited ranges and lengths are also contemplated to be part of the disclosure.

[0156] Similarly, the region of complementarity to the target sequence is 15 to 30 nucleotides in length, e.g., 15-29, 15-28, 15-27, 15-26, 15-25, 15-24, 15-23, 15-22, 15-21, 15-20, 15-19, 15-18, 15-17, 18-30, 18-29, 18-28, 18-27, 18-26, 18-25, 18-24, 18-23, 18-22, 18-21, 18-20, 19-30, 19-29, 19-28, 19-27, 19-26, 19-25, 19-24, 19-23, 19-22, 19-21, 19-20, 20-30, 20-29, 20-28, 20-27, 20-26, 20-25, 20-24, 20-23, 20-22, 20-21, 21-30, 21-29, 21-28, 21-27, 21-26, 21-25, 21-24, 21-23, or 21-22 nucleotides in length, for example 19-23 nucleotides in length or 21-23 nucleotides in length. Ranges and lengths intermediate to the above recited ranges and lengths are also contemplated to be part of the disclosure.

[0157] In some embodiments, the duplex structure is 19 to 30 base pairs in length. Similarly, the region of complementarity to the target sequence is 19 to 30 nucleotides in length.

[0158] In some embodiments, the dsRNA is about 19 to about 23 nucleotides in length, or about 25 to about 30 nucleotides in length. In general, the dsRNA is long enough to serve as a substrate for the Dicer enzyme. For example, it is well-known in the art that dsRNAs longer than about 21-23 nucleotides in length may serve as substrates for Dicer. As the ordinarily skilled person will also recognize, the region of an RNA targeted for cleavage will most often be part of a larger RNA molecule, often an mRNA molecule. Where relevant, a “part” of an mRNA target is a contiguous sequence of an mRNA target of sufficient length to allow it to be a substrate for RNAi-directed cleavage (i.e., cleavage through a RISC pathway).

[0159] One of skill in the art will also recognize that the duplex region is a primary functional portion of a dsRNA, e.g., a duplex region of about 19 to about 30 base pairs, e.g., about 19-30, 19-29, 19-28, 19-27, 19-26, 19-25, 19-24, 19-23, 19-22, 19-21, 19-20, 20-30, 20-29, 20-28, 20-27, 20-26, 20-25, 20-24, 20-23, 20-22, 20-21, 21-30, 21-29, 21-28, 21-27, 21-26, 21-25, 21-24, 21-23, or 21-22 base pairs. Thus, in one embodiment, to the extent that it becomes processed to a functional duplex, of e.g., 15-30 base pairs, that targets a desired RNA for cleavage, an RNA molecule or complex of RNA molecules having a duplex region greater than 30 base pairs is a dsRNA. Thus, an ordinarily skilled artisan will recognize that in one embodiment, a miRNA is a dsRNA. In another embodiment, a dsRNA is not a naturally occurring miRNA. In another embodiment, an iRNA agent useful to target PRODH2 gene expression is not generated in the target cell by cleavage of a larger dsRNA.

[0160] A dsRNA as described herein can further include one or more single-stranded nucleotide overhangs, e.g., 1-4, 2-4, 1-3, 2-3, 1, 2, 3, or 4 nucleotides. dsRNAs having at least one nucleotide overhang can have superior inhibitory properties relative to their blunt-ended counterparts. A nucleotide overhang can comprise or consist of a nucleotide/nucleoside analog, including a deoxynucleotide/nucleoside. The overhang(s) can be on the sense strand, the antisense strand, or any combination thereof. Furthermore, the nucleotide(s) of an overhang can be present on the 5′-end, 3′-end, or both ends of an antisense or sense strand of a dsRNA.

[0161] A dsRNA can be synthesized by standard methods known in the art. Double stranded RNAi compounds of the invention may be prepared using a two-step procedure. First, the individual strands of the double stranded RNA molecule are prepared separately. Then, the component strands are annealed. The individual strands of the siRNA compound can be prepared using solution-phase or solid-phase organic synthesis or both. Organic synthesis offers the advantage that the oligonucleotide strands comprising unnatural or modified nucleotides can be easily prepared. Similarly, single-stranded oligonucleotides of the invention can be prepared using solution-phase or solid-phase organic synthesis or both.

[0162] In an aspect, a dsRNA of the invention includes at least two nucleotide sequences, a sense sequence and an anti-sense sequence. The sense strand is selected from the group of sequences provided in any one of Tables 2-3, and the corresponding antisense strand of the sense strand is selected from the group of sequences of any one of Tables 2-3. In this aspect, one of the two sequences is complementary to the other of the two sequences, with one of the sequences being substantially complementary to a sequence of an mRNA generated in the expression of a PRODH2 gene. As such, in this aspect, a dsRNA will include two oligonucleotides, where one oligonucleotide is described as the sense strand in any one of Tables 2-3, and the second oligonucleotide is described as the corresponding antisense strand of the sense strand in any one of Tables 2-3.

[0163] In certain embodiments, the substantially complementary sequences of the dsRNA are contained on separate oligonucleotides. In other embodiments, the substantially complementary sequences of the dsRNA are contained on a single oligonucleotide.

[0164] In one embodiment, the antisense strand comprises at least 15, e.g., 15, 16, 17, 18, 19, or 20, contiguous nucleotides differing by no more than 0, 1, 2, or 3 nucleotides from any one of the antisense strand nucleotide sequences in any one of Tables 2-3.

[0165] It will be understood that, although the sequences in, for example, Table 3, are not described as modified or conjugated sequences, the RNA of the iRNA of the invention e.g., a dsRNA of the invention, may comprise any one of the sequences set forth in any one of Tables 2-3 that is un-modified, un-conjugated, or modified or conjugated differently than described therein. In other words, the invention encompasses dsRNA of Tables 2-3 which are un-modified, un-conjugated, modified, or conjugated, as described herein.

[0166] The skilled person is well aware that dsRNAs having a duplex structure of about 20 to 23 base pairs, e.g., 21, base pairs have been hailed as particularly effective in inducing RNA interference (Elbashir et al., EMBO 2001, 20:6877-6888). However, others have found that shorter or longer RNA duplex structures can also be effective (Chu and Rana (2007) RNA 14:1714-1719; Kim et al. (2005) Nat Biotech 23:222-226). In the embodiments described above, by virtue of the nature of the oligonucleotide sequences provided in any one of Tables 2-3. dsRNAs described herein can include at least one strand of a length of minimally 21 nucleotides. It can be reasonably expected that shorter duplexes having any one of the sequences in any one of Tables 2-3 minus only a few nucleotides on one or both ends can be similarly effective as compared to the dsRNAs described above. Hence, dsRNAs having a sequence of at least 19, 20, or more contiguous nucleotides derived from any one of the sequences of any one of Tables 2-3, and differing in their ability to inhibit the expression of a PRODH2 gene by not more than about 5, 10, 15, 20, 25, or 30% inhibition from a dsRNA comprising the full sequence, are contemplated to be within the scope of the present invention.

[0167] In addition, the RNAs provided in Tables 2-3 identify a site(s) in a PRODH2 transcript that is susceptible to RISC-mediated cleavage. As such, the present invention further features iRNAs that target within one of these sites. As used herein, an iRNA is said to target within a particular site of an RNA transcript if the iRNA promotes cleavage of the transcript anywhere within that particular site. Such an iRNA will generally include at least about 19 contiguous nucleotides from any one of the sequences provided in any one of Tables 2-3 coupled to additional nucleotide sequences taken from the region contiguous to the selected sequence in a PRODH2 gene.

### III. Modified iRNAs of the Invention

[0168] In certain embodiments, the RNA of the iRNA of the invention e.g., a dsRNA, is un-modified, and does not comprise, e.g., chemical modifications or conjugations known in the art and described herein. In other embodiments, the RNA of an iRNA of the invention, e.g., a dsRNA, is chemically modified to enhance stability or other beneficial characteristics. In certain embodiments of the invention, substantially all of the nucleotides of an iRNA of the invention are modified. In other embodiments of the invention, all of the nucleotides of an iRNA or substantially all of the nucleotides of an iRNA are modified, i.e., not more than 5, 4, 3, 2, or 1 unmodified nucleotides are present in a strand of the iRNA.

[0169] The nucleic acids featured in the invention can be synthesized or modified by methods well established in the art, such as those described in “Current protocols in nucleic acid chemistry,” Beaucage, S. L. et al. (Edrs.), John Wiley & Sons, Inc., New York, NY, USA, which is hereby incorporated herein by reference. Modifications include, for example, end modifications, e.g., 5′-end modifications (phosphorylation, conjugation, inverted linkages) or 3′-end modifications (conjugation, DNA nucleotides, inverted linkages, etc.); base modifications, e.g., replacement with stabilizing bases, destabilizing bases, or bases that base pair with an expanded repertoire of partners, removal of bases (abasic nucleotides), or conjugated bases; sugar modifications (e.g., at the 2′-position or 4′-position) or replacement of the sugar; or backbone modifications, including modification or replacement of the phosphodiester linkages. Specific examples of iRNA compounds useful in the embodiments described herein include, but are not limited to RNAs containing modified backbones or no natural internucleoside linkages. RNAs having modified backbones include, among others, those that do not have a phosphorus atom in the backbone. For the purposes of this specification, and as sometimes referenced in the art, modified RNAs that do not have a phosphorus atom in their internucleoside backbone can also be considered to be oligonucleosides. In some embodiments, a modified iRNA will have a phosphorus atom in its internucleoside backbone.

[0170] Modified RNA backbones include, for example, phosphorothioates, chiral phosphorothioates, phosphorodithioates, phosphotriesters, aminoalkylphosphotriesters, methyl and other alkyl phosphonates including 3-alkylene phosphonates and chiral phosphonates, phosphinates, phosphoramidates including 3′-amino phosphoramidate and aminoalkylphosphoramidates, thionophosphoramidates, thionoalkylphosphonates, thionoalkylphosphotriesters, and boranophosphates having normal 3′-5′ linkages, 2′-5′-linked analogs of these, and those having inverted polarity wherein the adjacent pairs of nucleoside units are linked 3′-5′ to 5′-3′ or 2′-5′ to 5′-2′. Various salts, mixed salts and free acid forms are also included. In some embodiments of the invention, the dsRNA agents of the invention are in a free acid form. In other embodiments of the invention, the dsRNA agents of the invention are in a salt form. In one embodiment, the dsRNA agents of the invention are in a sodium salt form. In certain embodiments, when the dsRNA agents of the invention are in the sodium salt form, sodium ions are present in the agent as counterions for substantially all of the phosphodiester and/or phosphorothiotate groups present in the agent. Agents in which substantially all of the phosphodiester and/or phosphorothioate linkages have a sodium counterion include not more than 5, 4, 3, 2, or 1 phosphodiester and/or phosphorothioate linkages without a sodium counterion. In some embodiments, when the dsRNA agents of the invention are in the sodium salt form, sodium ions are present in the agent as counterions for all of the phosphodiester and/or phosphorothiotate groups present in the agent.

[0171] Representative U.S. patents that teach the preparation of the above phosphorus-containing linkages include, but are not limited to, U.S. Pat. Nos. 3,687,808; 4,469,863; 4,476,301; 5,023,243; 5,177,195; 5,188,897; 5,264,423; 5,276,019; 5,278,302; 5,286,717; 5,321,131; 5,399,676; 5,405,939; 5,453,496; 5,455,233; 5,466,677; 5,476,925; 5,519,126; 5,536,821; 5,541,316; 5,550,111; 5,563,253; 5,571,799; 5,587,361; 5,625,050; 6,028,188; 6,124,445; 6,160,109; 6,169,170; 6,172,209; 6,239,265; 6,277,603; 6,326,199; 6,346,614; 6,444,423; 6,531,590; 6,534,639; 6,608,035; 6,683,167; 6,858,715; 6,867,294; 6,878,805; 7,015,315; 7,041,816; 7,273,933; 7,321,029; and U.S. Pat. RE39464, the entire contents of each of which are hereby incorporated herein by reference.

[0172] Modified RNA backbones that do not include a phosphorus atom therein have backbones that are formed by short chain alkyl or cycloalkyl internucleoside linkages, mixed heteroatoms and alkyl or cycloalkyl internucleoside linkages, or one or more short chain heteroatomic or heterocyclic internucleoside linkages. These include those having morpholino linkages (formed in part from the sugar portion of a nucleoside); siloxane backbones; sulfide, sulfoxide and sulfone backbones; formacetyl and thioformacetyl backbones; methylene formacetyl and thioformacetyl backbones; alkene containing backbones; sulfamate backbones; methyleneimino and methylenehydrazino backbones; sulfonate and sulfonamide backbones; amide backbones; and others having mixed N, O, S, and CH₂ component parts.

[0173] Representative U.S. patents that teach the preparation of the above oligonucleosides include, but are not limited to, U.S. Pat. Nos. 5,034,506; 5,166,315; 5,185,444; 5,214,134; 5,216,141; 5,235,033; 5,64,562; 5,264,564; 5,405,938; 5,434,257; 5,466,677; 5,470,967; 5,489,677; 5,541,307; 5,561,225; 5,596,086; 5,602,240; 5,608,046; 5,610,289; 5,618,704; 5,623,070; 5,663,312; 5,633,360; 5,677,437; and 5,677,439, the entire contents of each of which are hereby incorporated herein by reference.

[0174] Suitable RNA mimetics are contemplated for use in iRNAs provided herein, in which both the sugar and the internucleoside linkage, i.e., the backbone, of the nucleotide units are replaced with novel groups. The base units are maintained for hybridization with an appropriate nucleic acid target compound. One such oligomeric compound in which an RNA mimetic that has been shown to have excellent hybridization properties is referred to as a peptide nucleic acid (PNA). In PNA compounds, the sugar backbone of an RNA is replaced with an amide containing backbone, in particular an aminoethylglycine backbone. The nucleobases are retained and are bound directly or indirectly to aza nitrogen atoms of the amide portion of the backbone. Representative US patents that teach the preparation of PNA compounds include, but are not limited to, U.S. Pat. Nos. 5,539,082; 5,714,331; and 5,719,262, the entire contents of each of which are hereby incorporated herein by reference. Additional PNA compounds suitable for use in the iRNAs of the invention are described in, for example, in Nielsen et al., Science, 1991, 254, 1497-1500.

[0175] Some embodiments featured in the invention include RNAs with phosphorothioate backbones and oligonucleosides with heteroatom backbones, and in particular —CH₂—NH—CH₂—, —CH₂—N(CH₃)—O—CH₂—[known as a methylene (methylimino) or MMI backbone], —CH₂—O—N(CH₃)—CH₂—, —CH₂—N(CH₃)—N(CH₃)—CH₂— and —N(CH₃)—CH₂—CH₂— of the above-referenced U.S. Pat. No. 5,489,677, and the amide backbones of the above-referenced U.S. Pat. No. 5,602,240. In some embodiments, the RNAs featured herein have morpholino backbone structures of the above-referenced U.S. Pat. No. 5,034,506. The native phosphodiester backbone can be represented as O—P(O)(OH)—OCH2-.

[0176] Modified RNAs can also contain one or more substituted sugar moieties. The iRNAs, e.g., dsRNAs, featured herein can include one of the following at the 2′-position: OH; F; O-, S-, or N-alkyl; O-, S-, or N-alkenyl; O-, S- or N-alkynyl; or O-alkyl-O-alkyl, wherein the alkyl, alkenyl and alkynyl can be substituted or unsubstituted C₁ to C₁₀ alkyl or C₂ to C₁₀ alkenyl and alkynyl. Exemplary suitable modifications include O[(CH₂)ₙO]ₙCH₃, O(CH₂)ₙOCH₃, O(CH₂)ₙNH₂, O(CH₂)ₙCH₃, O(CH₂)ₙONH₂, and O(CH₂)ₙON[(CH₂)ₙCH₃)]₂, where n and m are from 1 to about 10. In other embodiments, dsRNAs include one of the following at the 2′ position: C₁ to C₁₀ lower alkyl, substituted lower alkyl, alkaryl, aralkyl, O-alkaryl or O-aralkyl, SH, SCH₃, OCN, Cl, Br, CN, CF₃, OCF₃, SOCH₃, SO₂CH₃, ONO₂, NO₂, N₃, NH₂, heterocycloalkyl, heterocycloalkaryl, aminoalkylamino, polyalkylamino, substituted silyl, an RNA cleaving group, a reporter group, an intercalator, a group for improving the pharmacokinetic properties of an iRNA, or a group for improving the pharmacodynamic properties of an iRNA, and other substituents having similar properties. In some embodiments, the modification includes a 2′-methoxyethoxy (2′-O—CH₂CH₂OCH₃, also known as 2′-O-(2-methoxyethyl) or 2′-MOE) (Martin et al., Helv. Chim. Acta, 1995, 78:486-504) i.e., an alkoxy-alkoxy group. Another exemplary modification is 2′-dimethylaminooxyethoxy, i.e., a O(CH₂)₂ON(CH₃)₂ group, also known as 2′-DMAOE, as described in examples herein below, and 2′-dimethylaminoethoxyethoxy (also known in the art as 2′-O-dimethylaminoethoxyethyl or 2′-DMAEOE), i.e., 2′-O—CH₂—O—CH₂—N(CH₃)₂. Further exemplary modifications include: 5′-Me-2′-F nucleotides, 5′-Me-2′-OMe nucleotides, 5′-Me-2′-deoxynucleotides, (both R and S isomers in these three families); 2′-alkoxyalkyl; and 2′-NMA (N-methylacetamide).

[0177] Other modifications include 2′-methoxy (2′-OCH₃), 2′-aminopropoxy (2′-OCH₂CH₂CH₂NH₂) and 2′-fluoro (2′-F). Similar modifications can also be made at other positions on the RNA of an iRNA, particularly the 3′ position of the sugar on the 3′ terminal nucleotide or in 2′-5′ linked dsRNAs and the 5′ position of 5′ terminal nucleotide. iRNAs can also have sugar mimetics such as cyclobutyl moieties in place of the pentofuranosyl sugar. Representative US patents that teach the preparation of such modified sugar structures include, but are not limited to, U.S. Pat. Nos. 4,981,957; 5,118,800; 5,319,080; 5,359,044; 5,393,878; 5,446,137; 5,466,786; 5,514,785; 5,519,134; 5,567,811; 5,576,427; 5,591,722; 5,597,909; 5,610,300; 5,627,053; 5,639,873; 5,646,265; 5,658,873; 5,670,633; and 5,700,920, certain of which are commonly owned with the instant application. The entire contents of each of the foregoing are hereby incorporated herein by reference.

[0178] An iRNA can also include nucleobase (often referred to in the art simply as “base”) modifications or substitutions. As used herein, “unmodified” or “natural” nucleobases include the purine bases adenine (A) and guanine (G), and the pyrimidine bases thymine (T), cytosine (C), and uracil (U). Modified nucleobases include other synthetic and natural nucleobases such as deoxythimidine (dT), 5-methylcytosine (5-me-C), 5-hydroxymethyl cytosine, xanthine, hypoxanthine, 2-aminoadenine, 6-methyl and other alkyl derivatives of adenine and guanine, 2-propyl and other alkyl derivatives of adenine and guanine, 2-thiouracil, 2-thiothymine and 2-thiocytosine, 5-halouracil and cytosine, 5-propynyl uracil and cytosine, 6-azo uracil, cytosine and thymine, 5-uracil (pseudouracil), 4-thiouracil, 8-halo, 8-amino, 8-thiol, 8-thioalkyl, 8-hydroxyl anal other 8-substituted adenines and guanines, 5-halo, particularly 5-bromo, 5-trifluoromethyl and other 5-substituted uracils and cytosines, 7-methylguanine and 7-methyladenine, 8-azaguanine and 8-azaadenine, 7-deazaguanine and 7-daazaadenine and 3-deazaguanine and 3-deazaadenine. Further nucleobases include those disclosed in U.S. Pat. No. 3,687,808, those disclosed in Modified Nucleosides in Biochemistry, Biotechnology and Medicine, Herdewijn, P. ed. Wiley-VCH, 2008; those disclosed in The Concise Encyclopedia Of Polymer Science And Engineering, pages 858-859, Kroschwitz, J. L, ed. John Wiley & Sons, 1990, these disclosed by Englisch et al., Angewandte Chemie, International Edition, 1991, 30, 613, and those disclosed by Sanghvi, Y S., Chapter 15, dsRNA Research and Applications, pages 289-302, Crooke, S. T. and Lebleu, B., Ed., CRC Press, 1993. Certain of these nucleobases are particularly useful for increasing the binding affinity of the oligomeric compounds featured in the invention. These include 5-substituted pyrimidines, 6-azapyrimidines and N-2, N-6 and 0-6 substituted purines, including 2-aminopropyladenine, 5-propynyluracil and 5-propynylcytosine. 5-methylcytosine substitutions have been shown to increase nucleic acid duplex stability by 0.6-1.2° C. (Sanghvi, Y. S., Crooke, S. T. and Lebleu, B., Eds., dsRNA Research and Applications, CRC Press, Boca Raton, 1993, pp. 276-278) and are exemplary base substitutions, even more particularly when combined with 2′-O-methoxyethyl sugar modifications.

[0179] Representative U.S. patents that teach the preparation of certain of the above noted modified nucleobases as well as other modified nucleobases include, but are not limited to, the above noted U.S. Pat. Nos. 3,687,808, 4,845,205; 5,130,30; 5,134,066; 5,175,273; 5,367,066; 5,432,272; 5,457,187; 5,459,255; 5,484,908; 5,502,177; 5,525,711; 5,552,540; 5,587,469; 5,594,121, 5,596,091; 5,614,617; 5,681,941; 5,750,692; 6,015,886; 6,147,200; 6,166,197; 6,222,025; 6,235,887; 6,380,368; 6,528,640; 6,639,062; 6,617,438; 7,045,610; 7,427,672; and 7,495,088, the entire contents of each of which are hereby incorporated herein by reference.

[0180] In some embodiments, an RNAi agent of the disclosure can also be modified to include one or more bicyclic sugar moieties. A “bicyclic sugar” is a furanosyl ring modified by a ring formed by the bridging of two carbons, whether adjacent or non-adjacent. A “bicyclic nucleoside” (“BNA”) is a nucleoside having a sugar moiety comprising a ring formed by bridging two carbons, whether adjacent or non-adjacent, of the sugar ring, thereby forming a bicyclic ring system. In certain embodiments, the bridge connects the 4′-carbon and the 2′-carbon of the sugar ring, optionally, via the 2′-acyclic oxygen atom. Thus, in some embodiments an agent of the invention may include one or more locked nucleic acids (LNA). A locked nucleic acid is a nucleotide having a modified ribose moiety in which the ribose moiety comprises an extra bridge connecting the 2′ and 4′ carbons. In other words, an LNA is a nucleotide comprising a bicyclic sugar moiety comprising a 4′-CH₂—O-2′ bridge. This structure effectively “locks” the ribose in the 3′-endo structural conformation. The addition of locked nucleic acids to siRNAs has been shown to increase siRNA stability in serum, and to reduce off-target effects (Elmen, J. et al., (2005) Nucleic Acids Research 33(1):439-447; Mook, O R. et al., (2007) Mol Canc Ther 6(3):833-843; Grunweller, A. et al., (2003) Nucleic Acids Research 31(12):3185-3193). Examples of bicyclic nucleosides for use in the polynucleotides of the invention include without limitation nucleosides comprising a bridge between the 4′ and the 2′ ribosyl ring atoms. In certain embodiments, the antisense polynucleotide agents of the invention include one or more bicyclic nucleosides comprising a 4′ to 2′ bridge.

[0181] A locked nucleoside can be represented by the structure (omitting stereochemistry),

[chemical structure]

[0182] wherein B is a nucleobase or modified nucleobase and L is the linking group that joins the 2′-carbon to the 4′-carbon of the ribose ring. Examples of such 4′ to 2′ bridged bicyclic nucleosides, include but are not limited to 4′-(CH₂)—O-2′ (LNA); 4′-(CH₂)—S-2′; 4′-(CH₂)₂—O-2′ (ENA); 4′-CH(CH₃)—O-2′ (also referred to as “constrained ethyl” or “cEt”) and 4′-CH(CH₂OCH₃)—O-2′ (and analogs thereof; see, e.g., U.S. Pat. No. 7,399,845); 4′-C(CH₃)(CH₃)—O-2′ (and analogs thereof; see e.g., U.S. Pat. No. 8,278,283); 4′-CH₂—N(OCH₃)-2′ (and analogs thereof; see e.g., U.S. Pat. No. 8,278,425); 4′-CH₂—O—N(CH₃)-2′ (see, e.g., U.S. Patent Publication No. 2004/0171570); 4′-CH₂—N(R)—O-2′, wherein R is H, C1-C12 alkyl, or a nitrogen protecting group (see, e.g., U.S. Pat. No. 7,427,672); 4′-CH₂—C(H)(CH₃)-2′ (see, e.g., Chattopadhyaya et al., J. Org. Chem., 2009, 74, 118-134); and 4′-CH₂—C(═CH₂)-2′ (and analogs thereof; see, e.g., U.S. Pat. No. 8,278,426). The entire contents of each of the foregoing are hereby incorporated herein by reference.

[0183] Additional representative U.S. patents and U.S. patenttent Publications that teach the preparation of locked nucleic acid nucleotides include, but are not limited to, the following: U.S. Pat. Nos. 6,268,490; 6,525,191; 6,670,461; 6,770,748; 6,794,499; 6,998,484; 7,053,207; 7,034,133; 7,084,125; 7,399,845; 7,427,672; 7,569,686; 7,741,457; 8,022,193; 8,030,467; 8,278,425; 8,278,426; 8,278,283; US 2008/0039618; and US 2009/0012281, the entire contents of each of which are hereby incorporated herein by reference.

[0184] Any of the foregoing bicyclic nucleosides can be prepared having one or more stereochemical sugar configurations including for example α-L-ribofuranose and β-D-ribofuranose (see WO 99/14226).

[0185] The RNA of an iRNA can also be modified to include one or more constrained ethyl nucleotides. As used herein, a “constrained ethyl nucleotide” or “cEt” is a locked nucleic acid comprising a bicyclic sugar moiety comprising a 4′-CH(CH₃)—O-2′ bridge (i.e., L in the preceding structure). In one embodiment, a constrained ethyl nucleotide is in the S conformation referred to herein as “S-cEt.”

[0186] An iRNA of the invention may also include one or more “conformationally restricted nucleotides” (“CRN”). CRN are nucleotide analogs with a linker connecting the C2′ and C4′ carbons of ribose or the C3 and —C5′ carbons of ribose. CRN lock the ribose ring into a stable conformation and increase the hybridization affinity to mRNA. The linker is of sufficient length to place the oxygen in an optimal position for stability and affinity resulting in less ribose ring puckering.

[0187] Representative publications that teach the preparation of certain of the above noted CRN include, but are not limited to, U.S. Patent Publication No. 2013/0190383; and PCT publication WO 2013/036868, the entire contents of each of which are hereby incorporated herein by reference.

[0188] In some embodiments, an iRNA of the invention comprises one or more monomers that are UNA (unlocked nucleic acid) nucleotides. UNA is unlocked acyclic nucleic acid, wherein any of the bonds of the sugar has been removed, forming an unlocked “sugar” residue. In one example, UNA also encompasses monomer with bonds between C1′-C4′ have been removed (i.e. the covalent carbon-oxygen-carbon bond between the C1′ and C4′ carbons). In another example, the C2′-C3′ bond (i.e. the covalent carbon-carbon bond between the C2′ and C3′ carbons) of the sugar has been removed (see Nuc. Acids Symp. Series, 52, 133-134 (2008) and Fluiter et al., Mol. Biosyst., 2009, 10, 1039 hereby incorporated by reference).

[0189] Representative U.S. publications that teach the preparation of UNA include, but are not limited to, U.S. Pat. No. 8,314,227; and U.S. Patent Publication Nos. 2013/0096289; 2013/0011922; and 2011/0313020, the entire contents of each of which are hereby incorporated herein by reference.

[0190] Potentially stabilizing modifications to the ends of RNA molecules can include N-(acetylaminocaproyl)-4-hydroxyprolinol (Hyp-C6-NHAc), N-(caproyl-4-hydroxyprolinol (Hyp-C6), N-(acetyl-4-hydroxyprolinol (Hyp-NHAc), thymidine-2′-O-deoxythymidine (ether), N-(aminocaproyl)-4-hydroxyprolinol (Hyp-C6-amino), 2-docosanoyl-uridine-3′-phosphate, inverted 2′-deoxy-modified ribonucleotide, such as inverted dT(idT), inverted dA (idA), and inverted abasic 2′-deoxyribonucleotide (iAb) and others. Disclosure of this modification can be found in WO 2011/005861.

[0191] In one example, the 3′ or 5′ terminal end of a oligonucleotide is linked to an inverted 2′-deoxy-modified ribonucleotide, such as inverted dT (idT), inverted dA (idA), or a inverted abasic 2′-deoxyribonucleotide (iAb). In one particular example, the inverted 2′-deoxy-modified ribonucleotide is linked to the 3′ end of an oligonucleotide, such as the 3′-end of a sense strand described herein, where the linking is via a 3′-3′ phosphodiester linkage or a 3′-3′-phosphorothioate linkage.

[0192] In another example, the 3′-end of a sense strand is linked via a 3′-3′-phosphorothioate linkage to an inverted abasic ribonucleotide (iAb). In another example, the 3′-end of a sense strand is linked via a 3′-3′-phosphorothioate linkage to an inverted dA (idA).

[0193] In one particular example, the inverted 2′-deoxy-modified ribonucleotide is linked to the 3′ end of an oligonucleotide, such as the 3′-end of a sense strand described herein, where the linking is via a 3′-3′ phosphodiester linkage or a 3′-3′-phosphorothioate linkage.

[0194] In another example, the 3′-terminal nucleotides of a sense strand is an inverted dA (idA) and is linked to the preceding nucleotide via a 3′-3′- linkage (e.g., 3′-3′-phosphorothioate linkage). Other modifications of the nucleotides of an iRNA of the invention include a 5′ phosphate or 5′ phosphate mimic, e.g., a 5′-terminal phosphate or phosphate mimic on the antisense strand of an iRNA. Suitable phosphate mimics are disclosed in, for example U.S. Patent Publication No. 2012/0157511, the entire contents of which are incorporated herein by reference.

A. Modified iRNAs Comprising Motifs of the Invention

[0195] In certain aspects of the invention, the double stranded RNA agents of the invention include agents with chemical modifications as disclosed, for example, in WO2013/075035, the entire contents of each of which are incorporated herein by reference. As shown herein and in WO2013/075035, one or more motifs of three identical modifications on three consecutive nucleotides may be introduced into a sense strand or antisense strand of a dsRNAi agent, particularly at or near the cleavage site. In some embodiments, the sense strand and antisense strand of the dsRNAi agent may otherwise be completely modified. The introduction of these motifs interrupts the modification pattern, if present, of the sense or antisense strand. The dsRNAi agent may be optionally conjugated with a GalNAc derivative ligand, for instance on the sense strand.

[0196] More specifically, when the sense strand and antisense strand of the double stranded RNA agent are completely modified to have one or more motifs of three identical modifications on three consecutive nucleotides at or near the cleavage site of at least one strand of a dsRNAi agent, the gene silencing activity of the dsRNAi agent was observed.

[0197] Accordingly, the invention provides double stranded RNA agents capable of inhibiting the expression of a target gene (i.e., PRODH2 gene) in vivo. The RNAi agent comprises a sense strand and an antisense strand. Each strand of the RNAi agent may be, for example, 17-30 nucleotides in length, 25-30 nucleotides in length, 27-30 nucleotides in length, 19-25 nucleotides in length, 19-23 nucleotides in length, 19-21 nucleotides in length, 21-25 nucleotides in length, or 21-23 nucleotides in length.

[0198] The sense strand and antisense strand typically form a duplex double stranded RNA (“dsRNA”), also referred to herein as “dsRNAi agent.” The duplex region of a dsRNAi agent may be, for example, the duplex region can be 27-30 nucleotide pairs in length, 19-25 nucleotide pairs in length, 19-23 nucleotide pairs in length, 19-21 nucleotide pairs in length, 21-25 nucleotide pairs in length, or 21-23 nucleotide pairs in length. In another example, the duplex region is selected from 19, 20, 21, 22, 23, 24, 25, 26, and 27 nucleotides in length.

[0199] In certain embodiments, the dsRNAi agent may contain one or more overhang regions or capping groups at the 3′-end, 5′-end, or both ends of one or both strands. The overhang can be, independently, 1-6 nucleotides in length, for instance 2-6 nucleotides in length, 1-5 nucleotides in length, 2-5 nucleotides in length, 1-4 nucleotides in length, 2-4 nucleotides in length, 1-3 nucleotides in length, 2-3 nucleotides in length, or 1-2 nucleotides in length. In certain embodiments, the overhang regions can include extended overhang regions as provided above. The overhangs can be the result of one strand being longer than the other, or the result of two strands of the same length being staggered. The overhang can form a mismatch with the target mRNA or it can be complementary to the gene sequences being targeted or can be another sequence. The first and second strands can also be joined, e.g., by additional bases to form a hairpin, or by other non-base linkers.

[0200] In certain embodiments, the nucleotides in the overhang region of the dsRNAi agent can each independently be a modified or unmodified nucleotide including, but no limited to 2′-sugar modified, such as, 2′-F, 2′-O-methyl, thymidine (T), 2′-O-methoxyethyl-5-methyluridine (Teo), 2′-O-methoxyethyladenosine (Aeo), 2′-O-methoxyethyl-5-methylcytidine (m5Ceo), and any combinations thereof.

[0201] For example, TT can be an overhang sequence for either end on either strand. The overhang can form a mismatch with the target mRNA or it can be complementary to the gene sequences being targeted or can be another sequence.

[0202] The 5′- or 3′- overhangs at the sense strand, antisense strand, or both strands of the dsRNAi agent may be phosphorylated. In some embodiments, the overhang region(s) contains two nucleotides having a phosphorothioate between the two nucleotides, where the two nucleotides can be the same or different. In some embodiments, the overhang is present at the 3′-end of the sense strand, antisense strand, or both strands. In some embodiments, this 3′-overhang is present in the antisense strand. In some embodiments, this 3′-overhang is present in the sense strand.

[0203] The dsRNAi agent may contain only a single overhang, which can strengthen the interference activity of the RNAi, without affecting its overall stability. For example, the single-stranded overhang may be located at the 3′-end of the sense strand or, alternatively, at the 3-end of the antisense strand. The RNAi may also have a blunt end, located at the 5′-end of the antisense strand (i.e., the 3′-end of the sense strand) or vice versa. Generally, the antisense strand of the dsRNAi agent has a nucleotide overhang at the 3′-end, and the 5′-end is blunt. While not wishing to be bound by theory, the asymmetric blunt end at the 5′-end of the antisense strand and 3′-end overhang of the antisense strand favor the guide strand loading into RISC process.

[0204] In certain embodiments, the dsRNAi agent is a double blunt-ended of 19 nucleotides in length, wherein the sense strand contains at least one motif of three 2′-F modifications on three consecutive nucleotides at positions 7, 8, 9 from the 5′ end. The antisense strand contains at least one motif of three 2′-O-methyl modifications on three consecutive nucleotides at positions 11, 12, and 13 from the 5′ end.

[0205] In other embodiments, the dsRNAi agent is a double blunt-ended of 20 nucleotides in length, wherein the sense strand contains at least one motif of three 2′-F modifications on three consecutive nucleotides at positions 8, 9, and 10 from the 5′ end. The antisense strand contains at least one motif of three 2′-O-methyl modifications on three consecutive nucleotides at positions 11, 12, and 13 from the 5′ end.

[0206] In yet other embodiments, the dsRNAi agent is a double blunt-ended of 21 nucleotides in length, wherein the sense strand contains at least one motif of three 2′-F modifications on three consecutive nucleotides at positions 9, 10, and 11 from the 5′ end. The antisense strand contains at least one motif of three 2′-O-methyl modifications on three consecutive nucleotides at positions 11, 12, and 13 from the 5′ end.

[0207] In certain embodiments, the dsRNAi agent comprises a 21 nucleotide sense strand and a 23 nucleotide antisense strand, wherein the sense strand contains at least one motif of three 2′-F modifications on three consecutive nucleotides at positions 9, 10, and 11 from the 5′ end; the antisense strand contains at least one motif of three 2′-O-methyl modifications on three consecutive nucleotides at positions 11, 12, and 13 from the 5′ end, wherein one end of the RNAi agent is blunt, while the other end comprises a 2 nucleotide overhang. In one embodiment, the 2 nucleotide overhang is at the 3′-end of the antisense strand.

[0208] When the 2 nucleotide overhang is at the 3′-end of the antisense strand, there may be two phosphorothioate internucleotide linkages between the terminal three nucleotides, wherein two of the three nucleotides are the overhang nucleotides, and the third nucleotide is a paired nucleotide next to the overhang nucleotide. In one embodiment, the RNAi agent additionally has two phosphorothioate internucleotide linkages between the terminal three nucleotides at both the 5′-end of the sense strand and at the 5′-end of the antisense strand. In certain embodiments, every nucleotide in the sense strand and the antisense strand of the dsRNAi agent, including the nucleotides that are part of the motifs are modified nucleotides. In certain embodiments each residue is independently modified with a 2′-O-methyl or 3′-fluoro, e.g., in an alternating motif. Optionally, the dsRNAi agent further comprises a ligand (such as, GalNAc₃).

[0209] In certain embodiments, the dsRNAi agent comprises a sense and an antisense strand, wherein the sense strand is 25-30 nucleotide residues in length, wherein starting from the 5′ terminal nucleotide (position 1) positions 1 to 23 of the first strand comprise at least 8 ribonucleotides; the antisense strand is 36-66 nucleotide residues in length and, starting from the 3′ terminal nucleotide, comprises at least 8 ribonucleotides in the positions paired with positions 1-23 of sense strand to form a duplex; wherein at least the 3′ terminal nucleotide of antisense strand is unpaired with sense strand, and up to 6 consecutive 3′ terminal nucleotides are unpaired with sense strand, thereby forming a 3′ single stranded overhang of 1-6 nucleotides; wherein the 5′ terminus of antisense strand comprises from 10-30 consecutive nucleotides which are unpaired with sense strand, thereby forming a 10-30 nucleotide single stranded 5′ overhang; wherein at least the sense strand 5′ terminal and 3′ terminal nucleotides are base paired with nucleotides of antisense strand when sense and antisense strands are aligned for maximum complementarity, thereby forming a substantially duplexed region between sense and antisense strands; and antisense strand is sufficiently complementary to a target RNA along at least 19 ribonucleotides of antisense strand length to reduce target gene expression when the double stranded nucleic acid is introduced into a mammalian cell; and wherein the sense strand contains at least one motif of three 2′-F modifications on three consecutive nucleotides, where at least one of the motifs occurs at or near the cleavage site. The antisense strand contains at least one motif of three 2′-O-methyl modifications on three consecutive nucleotides at or near the cleavage site.

[0210] In certain embodiments, the dsRNAi agent comprises sense and antisense strands, wherein the dsRNAi agent comprises a first strand having a length which is at least 25 and at most 29 nucleotides and a second strand having a length which is at most 30 nucleotides with at least one motif of three 2′-O-methyl modifications on three consecutive nucleotides at position 11, 12, 13 from the 5′ end; wherein the 3′ end of the first strand and the 5′ end of the second strand form a blunt end and the second strand is 1-4 nucleotides longer at its 3′ end than the first strand, wherein the duplex region which is at least 25 nucleotides in length, and the second strand is sufficiently complementary to a target mRNA along at least 19 nucleotide of the second strand length to reduce target gene expression when the RNAi agent is introduced into a mammalian cell, and wherein Dicer cleavage of the dsRNAi agent results in an siRNA comprising the 3′-end of the second strand, thereby reducing expression of the target gene in the mammal. Optionally, the dsRNAi agent further comprises a ligand.

[0211] In certain embodiments, the sense strand of the dsRNAi agent contains at least one motif of three identical modifications on three consecutive nucleotides, where one of the motifs occurs at the cleavage site in the sense strand.

[0212] In certain embodiments, the antisense strand of the dsRNAi agent can also contain at least one motif of three identical modifications on three consecutive nucleotides, where one of the motifs occurs at or near the cleavage site in the antisense strand.

[0213] For a dsRNAi agent having a duplex region of 19-23 nucleotides in length, the cleavage site of the antisense strand is typically around the 10, 11, and 12 positions from the 5′-end. Thus the motifs of three identical modifications may occur at the 9, 10, 11 positions; the 10, 11, 12 positions; the 11, 12, 13 positions; the 12, 13, 14 positions; or the 13, 14, 15 positions of the antisense strand, the count starting from the first nucleotide from the 5′-end of the antisense strand, or, the count starting from the first paired nucleotide within the duplex region from the 5′-end of the antisense strand. The cleavage site in the antisense strand may also change according to the length of the duplex region of the dsRNAi agent from the 5′-end.

[0214] The sense strand of the dsRNAi agent may contain at least one motif of three identical modifications on three consecutive nucleotides at the cleavage site of the strand; and the antisense strand may have at least one motif of three identical modifications on three consecutive nucleotides at or near the cleavage site of the strand. When the sense strand and the antisense strand form a dsRNA duplex, the sense strand and the antisense strand can be so aligned that one motif of the three nucleotides on the sense strand and one motif of the three nucleotides on the antisense strand have at least one nucleotide overlap, i.e., at least one of the three nucleotides of the motif in the sense strand forms a base pair with at least one of the three nucleotides of the motif in the antisense strand. Alternatively, at least two nucleotides may overlap, or all three nucleotides may overlap.

[0215] In some embodiments, the sense strand of the dsRNAi agent may contain more than one motif of three identical modifications on three consecutive nucleotides. The first motif may occur at or near the cleavage site of the strand and the other motifs may be a wing modification. The term “wing modification” herein refers to a motif occurring at another portion of the strand that is separated from the motif at or near the cleavage site of the same strand. The wing modification is either adjacent to the first motif or is separated by at least one or more nucleotides. When the motifs are immediately adjacent to each other then the chemistries of the motifs are distinct from each other, and when the motifs are separated by one or more nucleotide than the chemistries can be the same or different. Two or more wing modifications may be present. For instance, when two wing modifications are present, each wing modification may occur at one end relative to the first motif which is at or near cleavage site or on either side of the lead motif.

[0216] Like the sense strand, the antisense strand of the dsRNAi agent may contain more than one motif of three identical modifications on three consecutive nucleotides, with at least one of the motifs occurring at or near the cleavage site of the strand. This antisense strand may also contain one or more wing modifications in an alignment similar to the wing modifications that may be present on the sense strand.

[0217] In some embodiments, the wing modification on the sense strand or antisense strand of the dsRNAi agent typically does not include the first one or two terminal nucleotides at the 3′-end, 5′-end, or both ends of the strand.

[0218] In other embodiments, the wing modification on the sense strand or antisense strand of the dsRNAi agent typically does not include the first one or two paired nucleotides within the duplex region at the 3′-end, 5′-end, or both ends of the strand.

[0219] When the sense strand and the antisense strand of the dsRNAi agent each contain at least one wing modification, the wing modifications may fall on the same end of the duplex region, and have an overlap of one, two, or three nucleotides.

[0220] When the sense strand and the antisense strand of the dsRNAi agent each contain at least two wing modifications, the sense strand and the antisense strand can be so aligned that two modifications each from one strand fall on one end of the duplex region, having an overlap of one, two, or three nucleotides; two modifications each from one strand fall on the other end of the duplex region, having an overlap of one, two or three nucleotides; two modifications one strand fall on each side of the lead motif, having an overlap of one, two or three nucleotides in the duplex region.

[0221] In some embodiments, every nucleotide in the sense strand and antisense strand of the dsRNAi agent, including the nucleotides that are part of the motifs, may be modified. Each nucleotide may be modified with the same or different modification which can include one or more alteration of one or both of the non-linking phosphate oxygens or of one or more of the linking phosphate oxygens; alteration of a constituent of the ribose sugar, e.g., of the 2′-hydroxyl on the ribose sugar; wholesale replacement of the phosphate moiety with “dephospho” linkers; modification or replacement of a naturally occurring base; and replacement or modification of the ribose-phosphate backbone.

[0222] As nucleic acids are polymers of subunits, many of the modifications occur at a position which is repeated within a nucleic acid, e.g., a modification of a base, or a phosphate moiety, or a non-linking O of a phosphate moiety. In some cases the modification will occur at all of the subject positions in the nucleic acid but in many cases it will not. By way of example, a modification may only occur at a 3′- or 5′ terminal position, may only occur in a terminal region, e.g., at a position on a terminal nucleotide or in the last 2, 3, 4, 5, or 10 nucleotides of a strand. A modification may occur in a double strand region, a single strand region, or in both. A modification may occur only in the double strand region of an RNA or may only occur in a single strand region of a RNA. For example, a phosphorothioate modification at a non-linking O position may only occur at one or both termini, may only occur in a terminal region, e.g., at a position on a terminal nucleotide or in the last 2, 3, 4, 5, or 10 nucleotides of a strand, or may occur in double strand and single strand regions, particularly at termini. The 5′-end or ends can be phosphorylated.

[0223] It may be possible, e.g., to enhance stability, to include particular bases in overhangs, or to include modified nucleotides or nucleotide surrogates, in single strand overhangs, e.g., in a 5′- or 3′-overhang, or in both. For example, it can be desirable to include purine nucleotides in overhangs. In some embodiments all or some of the bases in a 3′- or 5′-overhang may be modified, e.g., with a modification described herein. Modifications can include, e.g., the use of modifications at the 2′ position of the ribose sugar with modifications that are known in the art, e.g., the use of deoxyribonucleotides, 2′-deoxy-2′-fluoro (2′-F) or 2′-O-methyl modified instead of the ribosugar of the nucleobase, and modifications in the phosphate group, e.g., phosphorothioate modifications. Overhangs need not be homologous with the target sequence.

[0224] In some embodiments, each residue of the sense strand and antisense strand is independently modified with LNA, CRN, cET, UNA, HNA, CeNA, 2′-methoxyethyl, 2′-O-methyl, 2′-O-allyl, 2′-C-allyl, 2′-deoxy, 2′-hydroxyl, or 2′-fluoro. The strands can contain more than one modification. In one embodiment, each residue of the sense strand and antisense strand is independently modified with 2′-O-methyl or 2′-fluoro.

[0225] At least two different modifications are typically present on the sense strand and antisense strand. Those two modifications may be the 2′-O-methyl or 2′-fluoro modifications, or others.

[0226] In certain embodiments, the Nₐ or N_{b} comprise modifications of an alternating pattern. The term “alternating motif” as used herein refers to a motif having one or more modifications, each modification occurring on alternating nucleotides of one strand. The alternating nucleotide may refer to one per every other nucleotide or one per every three nucleotides, or a similar pattern. For example, if A, B and C each represent one type of modification to the nucleotide, the alternating motif can be “ABABABABABAB . . . ,” “AABBAABBAABB . . . ,” “AABAABAABAAB . . . ,” “AAABAAABAAAB . . . ,” “AAABBBAAABBB . . . ,” or “ABCABCABCABC . . . ,” etc.

[0227] The type of modifications contained in the alternating motif may be the same or different. For example, if A, B, C, D each represent one type of modification on the nucleotide, the alternating pattern, i.e., modifications on every other nucleotide, may be the same, but each of the sense strand or antisense strand can be selected from several possibilities of modifications within the alternating motif such as “ABABAB . . . ”, “ACACAC . . . ” “BDBDBD . . . ” or “CDCDCD . . . ,” etc.

[0228] In some embodiments, the dsRNAi agent of the invention comprises the modification pattern for the alternating motif on the sense strand relative to the modification pattern for the alternating motif on the antisense strand is shifted. The shift may be such that the modified group of nucleotides of the sense strand corresponds to a differently modified group of nucleotides of the antisense strand and vice versa. For example, the sense strand when paired with the antisense strand in the dsRNA duplex, the alternating motif in the sense strand may start with “ABABAB” from 5′ to 3′ of the strand and the alternating motif in the antisense strand may start with “BABABA” from 5′ to 3′ of the strand within the duplex region. As another example, the alternating motif in the sense strand may start with “AABBAABB” from 5′ to 3′ of the strand and the alternating motif in the antisense strand may start with “BBAABBAA” from 5′ to 3′ of the strand within the duplex region, so that there is a complete or partial shift of the modification patterns between the sense strand and the antisense strand.

[0229] In one particular example, the alternating motif in the sense strand is “ABABAB” sfrom 5′ 3′ of the strand, where each A is an unmodified ribonucleotide and each B is a 2′-Omethyl modified nucleotide.

[0230] In one particular example, the alternating motif in the sense strand is “ABABAB” sfrom 5′ 3′ of the strand, where each A is an 2′-deoxy-2′-fluoro modified nucleotide and each B is a 2′-Omethyl modified nucleotide.

[0231] In another particular example, the alternating motif in the antisense strand is “BABABA” from 3′-5′ of the strand, where each A is a 2′-deoxy-2′-fluoro modified nucleotide and each B is a 2′-Omethyl modified nucleotide.

[0232] In one particular example, the alternating motif in the sense strand is “ABABAB” sfrom 5′ 3′ of the strand and the alternating motif in the antisense strand is “BABABA” from 3′-5′ of the strand, where each A is an unmodified ribonucleotide and each B is a 2′-Omethyl modified nucleotide.

[0233] In one particular example, the alternating motif in the sense strand is “ABABAB” sfrom 5′ 3′ of the strand and the alternating motif in the antisense strand is “BABABA” from 3′-5′ of the strand, where each A is a 2′-deoxy-2′-fluoro modified nucleotide and each B is a 2′-Omethyl modified nucleotide.

[0234] In some embodiments, the dsRNAi agent comprises the pattern of the alternating motif of 2′-O-methyl modification and 2′-F modification on the sense strand initially has a shift relative to the pattern of the alternating motif of 2′-O-methyl modification and 2′-F modification on the antisense strand initially, i.e., the 2′-O-methyl modified nucleotide on the sense strand base pairs with a 2′-F modified nucleotide on the antisense strand and vice versa. The 1 position of the sense strand may start with the 2′-F modification, and the 1 position of the antisense strand may start with the 2′-O-methyl modification.

[0235] The introduction of one or more motifs of three identical modifications on three consecutive nucleotides to the sense strand or antisense strand interrupts the initial modification pattern present in the sense strand or antisense strand. This interruption of the modification pattern of the sense or antisense strand by introducing one or more motifs of three identical modifications on three consecutive nucleotides to the sense or antisense strand may enhance the gene silencing activity against the target gene.

[0236] In some embodiments, when the motif of three identical modifications on three consecutive nucleotides is introduced to any of the strands, the modification of the nucleotide next to the motif is a different modification than the modification of the motif. For example, the portion of the sequence containing the motif is “ . . . NₐYYYN_{b} . . . ,” where “Y” represents the modification of the motif of three identical modifications on three consecutive nucleotide, and “Nₐ” and “N_{b}” represent a modification to the nucleotide next to the motif “YYY” that is different than the modification of Y, and where Nₐ and N_{b} can be the same or different modifications. Alternatively, Nₐ or N_{b} may be present or absent when there is a wing modification present.

[0237] The iRNA may further comprise at least one phosphorothioate or methylphosphonate internucleotide linkage. The phosphorothioate or methylphosphonate internucleotide linkage modification may occur on any nucleotide of the sense strand, antisense strand, or both strands in any position of the strand. For instance, the internucleotide linkage modification may occur on every nucleotide on the sense strand or antisense strand; each internucleotide linkage modification may occur in an alternating pattern on the sense strand or antisense strand; or the sense strand or antisense strand may contain both internucleotide linkage modifications in an alternating pattern. The alternating pattern of the internucleotide linkage modification on the sense strand may be the same or different from the antisense strand, and the alternating pattern of the internucleotide linkage modification on the sense strand may have a shift relative to the alternating pattern of the internucleotide linkage modification on the antisense strand. In one embodiment, a double-stranded RNAi agent comprises 6-8 phosphorothioate internucleotide linkages. In some embodiments, the antisense strand comprises two phosphorothioate internucleotide linkages at the 5′-end and two phosphorothioate internucleotide linkages at the 3′-end, and the sense strand comprises at least two phosphorothioate internucleotide linkages at either the 5′-end or the 3′-end.

[0238] In some embodiments, the dsRNAi agent comprises a phosphorothioate or methylphosphonate internucleotide linkage modification in the overhang region. For example, the overhang region may contain two nucleotides having a phosphorothioate or methylphosphonate internucleotide linkage between the two nucleotides. Internucleotide linkage modifications also may be made to link the overhang nucleotides with the terminal paired nucleotides within the duplex region. For example, at least 2, 3, 4, or all the overhang nucleotides may be linked through phosphorothioate or methylphosphonate internucleotide linkage, and optionally, there may be additional phosphorothioate or methylphosphonate internucleotide linkages linking the overhang nucleotide with a paired nucleotide that is next to the overhang nucleotide. For instance, there may be at least two phosphorothioate internucleotide linkages between the terminal three nucleotides, in which two of the three nucleotides are overhang nucleotides, and the third is a paired nucleotide next to the overhang nucleotide. These terminal three nucleotides may be at the 3′-end of the antisense strand, the 3′-end of the sense strand, the 5′-end of the antisense strand, or the 5′ end of the antisense strand.

[0239] In some embodiments, the 2-nucleotide overhang is at the 3′-end of the antisense strand, and there are two phosphorothioate internucleotide linkages between the terminal three nucleotides, wherein two of the three nucleotides are the overhang nucleotides, and the third nucleotide is a paired nucleotide next to the overhang nucleotide. Optionally, the dsRNAi agent may additionally have two phosphorothioate internucleotide linkages between the terminal three nucleotides at both the 5′-end of the sense strand and at the 5′-end of the antisense strand.

[0240] In one embodiment, the dsRNAi agent comprises mismatch(es) with the target, within the duplex, or combinations thereof. The mismatch may occur in the overhang region or the duplex region. The base pair may be ranked on the basis of their propensity to promote dissociation or melting (e.g., on the free energy of association or dissociation of a particular pairing, the simplest approach is to examine the pairs on an individual pair basis, though next neighbor or similar analysis can also be used). In terms of promoting dissociation: A:U is preferred over G:C; G:U is preferred over G:C; and I:C is preferred over G:C (I=inosine). Mismatches, e.g., non-canonical or other than canonical pairings (as described elsewhere herein) are preferred over canonical (A:T, A:U, G:C) pairings; and pairings which include a universal base are preferred over canonical pairings.

[0241] In certain embodiments, the dsRNAi agent comprises at least one of the first 1, 2, 3, 4, or 5 base pairs within the duplex regions from the 5′-end of the antisense strand independently selected from the group of: A:U, G:U, I:C, and mismatched pairs, e.g., non-canonical or other than canonical pairings or pairings which include a universal base, to promote the dissociation of the antisense strand at the 5′-end of the duplex.

[0242] In certain embodiments, the nucleotide at the 1 position within the duplex region from the 5′-end in the antisense strand is selected from A, dA, dU, U, and dT. Alternatively, at least one of the first 1, 2, or 3 base pair within the duplex region from the 5′-end of the antisense strand is an AU base pair. For example, the first base pair within the duplex region from the 5′-end of the antisense strand is an AU base pair.

[0243] In other embodiments, the nucleotide at the 3′-end of the sense strand is deoxythimidine (dT) or the nucleotide at the 3′-end of the antisense strand is deoxythimidine (dT). For example, there is a short sequence of deoxythimidine nucleotides, for example, two dT nucleotides on the 3′-end of the sense, antisense strand, or both strands.

[0244] In certain embodiments, the sense strand sequence may be represented by formula (I):

5′nₚ-Nₐ—(XXX)ᵢ—N_{b}—YYY—N_{b}—(ZZZ)ⱼ—Nₐ-n_{q}3′ (I)

[0245] wherein:
[0246] i and j are each independently 0 or 1;
[0247] p and q are each independently 0-6;
[0248] each Nₐ independently represents an oligonucleotide sequence comprising 0-25 modified nucleotides, each sequence comprising at least two differently modified nucleotides;
[0249] each N_{b} independently represents an oligonucleotide sequence comprising 0-10 modified nucleotides;
[0250] each nₚ and n_{q} independently represent an overhang nucleotide;
[0251] wherein Nb and Y do not have the same modification; and
[0252] XXX, YYY, and ZZZ each independently represent one motif of three identical modifications on three consecutive nucleotides. In one embodiment, YYY is all 2′-F modified nucleotides.

[0253] In some embodiments, the Nₐ or N_{b} comprises modifications of alternating pattern.

[0254] In some embodiments, the YYY motif occurs at or near the cleavage site of the sense strand. For example, when the dsRNAi agent has a duplex region of 17-23 nucleotides in length, the YYY motif can occur at or the vicinity of the cleavage site (e.g.: can occur at positions 6, 7, 8; 7, 8, 9; 8, 9, 10; 9, 10, 11; 10, 11, 12; or 11, 12, 13) of the sense strand, the count starting from the first nucleotide, from the 5′-end; or optionally, the count starting at the first paired nucleotide within the duplex region, from the 5′-end.

[0255] In one embodiment, i is 1 and j is 0, or i is 0 and j is 1, or both i and j are 1. The sense strand can therefore be represented by the following formulas:

5′nₚ-Nₐ—YYY—N_{b}—ZZZ—Nₐ-n_{q}3′ (Ib);

5′nₚ-Nₐ—XXX—N_{b}—YYY—Nₐ-n_{q}3′ (Ic); or

5′nₚ-Nₐ—XXX—N_{b}—YYY—N_{b}—ZZZ—Nₐ-n_{q}3′ (Id).

[0256] When the sense strand is represented by formula (Ib), N_{b} represents an oligonucleotide sequence comprising 0-10, 0-7, 0-5, 0-4, 0-2, or 0 modified nucleotides. Each Nₐ independently can represent an oligonucleotide sequence comprising 2-20, 2-15, or 2-10 modified nucleotides.

[0257] When the sense strand is represented as formula (Ic), N_{b} represents an oligonucleotide sequence comprising 0-10, 0-7, 0-10, 0-7, 0-5, 0-4, 0-2, or 0 modified nucleotides. Each Nₐ can independently represent an oligonucleotide sequence comprising 2-20, 2-15, or 2-10 modified nucleotides.

[0258] When the sense strand is represented as formula (Id), each N_{b} independently represents an oligonucleotide sequence comprising 0-10, 0-7, 0-5, 0-4, 0-2, or 0 modified nucleotides. In one embodiment, N_{b} is 0, 1, 2, 3, 4, 5, or 6 Each Nₐ can independently represent an oligonucleotide sequence comprising 2-20, 2-15, or 2-10 modified nucleotides.

[0259] Each of X, Y and Z may be the same or different from each other.

[0260] In other embodiments, i is 0 and j is 0, and the sense strand may be represented by the formula:

5′nₚ-Nₐ—YYY—Nₐ-n_{q}3′ (Ia).

[0261] When the sense strand is represented by formula (Ia), each Nₐ independently can represent an oligonucleotide sequence comprising 2-20, 2-15, or 2-10 modified nucleotides.

[0262] In one embodiment, the antisense strand sequence of the RNAi may be represented by formula (II):

5′n_{q}′-Nₐ′—(Z′Z′Z′)ₖ—N_{b}′—Y′Y′Y′—N_{b}′—(X′X′X′)ₗ—N′ₐ-nₚ′3′ (II)

[0263] wherein:
[0264] k and 1 are each independently 0 or 1;
[0265] p′ and q′ are each independently 0-6;
[0266] each Nₐ′ independently represents an oligonucleotide sequence comprising 0-25 modified nucleotides, each sequence comprising at least two differently modified nucleotides; each N_{b}′ independently represents an oligonucleotide sequence comprising 0-10 modified nucleotides;
[0267] each nₚ′ and n_{q}′ independently represent an overhang nucleotide;
[0268] wherein N_{b}′ and Y′ do not have the same modification; and
[0269] X′X′X′, Y′Y′Y′, and Z′Z′Z′ each independently represent one motif of three identical modifications on three consecutive nucleotides.

[0270] In some embodiments, the Nₐ′ or N_{b}′ comprises modifications of alternating pattern.

[0271] The Y′Y′Y′ motif occurs at or near the cleavage site of the antisense strand. For example, when the dsRNAi agent has a duplex region of 17-23 nucleotides in length, the Y′Y′Y′ motif can occur at positions 9, 10, 11; 10, 11, 12; 11, 12, 13; 12, 13, 14; or 13, 14, 15 of the antisense strand, with the count starting from the first nucleotide, from the 5′-end; or optionally, the count starting at the first paired nucleotide within the duplex region, from the 5′-end. In one embodiment, the Y′Y′Y′ motif occurs at positions 11, 12, 13.

[0272] In certain embodiments, Y′Y′Y′ motif is all 2′-OMe modified nucleotides.

[0273] In certain embodiments, k is 1 and 1 is 0, or k is 0 and 1 is 1, or both k and 1 are 1.

[0274] The antisense strand can therefore be represented by the following formulas:

5′n_{q′}-Nₐ′—Z′Z′Z′—N_{b}′—Y′Y′Y′—Nₐ′-n_{p′},3′ (IIb);

5′n_{q′}-Nₐ′—Y′Y′Y′—N_{b}′—X′X′X′-n_{p′},3′ (IIc); or

5′n_{q′}-Nₐ′—Z′Z′Z′—N_{b}′—Y′Y′Y′—N_{b}′—X′X′X′—Nₐ′-n_{p′},3′ (IId).

[0275] When the antisense strand is represented by formula (IIb), N_{b}′ represents an oligonucleotide sequence comprising 0-10, 0-7, 0-10, 0-7, 0-5, 0-4, 0-2, or 0 modified nucleotides. Each Nₐ′ independently represents an oligonucleotide sequence comprising 2-20, 2-15, or 2-10 modified nucleotides.

[0276] When the antisense strand is represented as formula (IIc), N_{b}′ represents an oligonucleotide sequence comprising 0-10, 0-7, 0-10, 0-7, 0-5, 0-4, 0-2, or 0 modified nucleotides. Each Nₐ′ independently represents an oligonucleotide sequence comprising 2-20, 2-15, or 2-10 modified nucleotides.

[0277] When the antisense strand is represented as formula (IId), each N_{b}′ independently represents an oligonucleotide sequence comprising 0-10, 0-7, 0-10, 0-7, 0-5, 0-4, 0-2, or 0 modified nucleotides. Each Nₐ′ independently represents an oligonucleotide sequence comprising 2-20, 2-15, or 2-10 modified nucleotides. In one embodiment, N_{b} is 0, 1, 2, 3, 4, 5, or 6.

[0278] In other embodiments, k is 0 and 1 is 0 and the antisense strand may be represented by the formula:

5′n_{p′}-N_{a′}—Y′Y′Y′—N_{a′}-n_{q′},3′ (Ia).

[0279] When the antisense strand is represented as formula (IIa), each Nₐ′ independently represents an oligonucleotide sequence comprising 2-20, 2-15, or 2-10 modified nucleotides. Each of X′, Y′ and Z′ may be the same or different from each other.

[0280] Each nucleotide of the sense strand and antisense strand may be independently modified with LNA, CRN, UNA, cEt, HNA, CeNA, 2′-methoxyethyl, 2′-O-methyl, 2′-O-allyl, 2′-C-allyl, 2′-hydroxyl, or 2′-fluoro. For example, each nucleotide of the sense strand and antisense strand is independently modified with 2′-O-methyl or 2′-fluoro. Each X, Y, Z, X′, Y′, and Z′, in particular, may represent a 2′-O-methyl modification or a 2′-fluoro modification.

[0281] In some embodiments, the sense strand of the dsRNAi agent may contain YYY motif occurring at 9, 10, and 11 positions of the strand when the duplex region is 21 nt, the count starting from the first nucleotide from the 5′-end, or optionally, the count starting at the first paired nucleotide within the duplex region, from the 5′-end; and Y represents 2′-F modification. The sense strand may additionally contain XXX motif or ZZZ motifs as wing modifications at the opposite end of the duplex region; and XXX and ZZZ each independently represents a 2′-OMe modification or 2′-F modification.

[0282] In some embodiments the antisense strand may contain Y′Y′Y′ motif occurring at positions 11, 12, 13 of the strand, the count starting from the first nucleotide from the 5′-end, or optionally, the count starting at the first paired nucleotide within the duplex region, from the 5′-end; and Y′ represents 2′-O-methyl modification. The antisense strand may additionally contain X′X′X′ motif or Z′Z′Z′ motifs as wing modifications at the opposite end of the duplex region; and X′X′X′ and Z′Z′Z′ each independently represents a 2′-OMe modification or 2′-F modification.

[0283] The sense strand represented by any one of the above formulas (Ia), (Ib), (Ic), and (Id) forms a duplex with an antisense strand being represented by any one of formulas (IIa), (IIb), (IIc), and (IId), respectively.

[0284] Accordingly, the dsRNAi agents for use in the methods of the invention may comprise a sense strand and an antisense strand, each strand having 14 to 30 nucleotides, the iRNA duplex represented by formula (III):

(III)
sense:
5′ nₚ-Nₐ-(X X X)ᵢ-N_{b}-Y Y Y-N_{b}-(Z Z Z)ⱼ-Nₐ-n_{q} 3′
antisense:
3′ nₚ′-Nₐ′-(X′X′X′)ₖ-N_{b}′-Y′Y′Y′-N_{b}′-(Z′Z′Z′)ₗ-Nₐ′-
n_{q}′ 5′

[0285] wherein:
[0286] i, j, k, and l are each independently 0 or 1;
[0287] p, p′, q, and q′ are each independently 0-6;
[0288] each Nₐ and Nₐ′ independently represents an oligonucleotide sequence comprising 0-25 modified nucleotides, each sequence comprising at least two differently modified nucleotides;
[0289] each N_{b} and N_{b}′ independently represents an oligonucleotide sequence comprising 0-10 modified nucleotides;
[0290] wherein each nₚ′, nₚ, n_{q}′, and n_{q}, each of which may or may not be present, independently represents an overhang nucleotide; and
[0291] XXX, YYY, ZZZ, X′X′X′, Y′Y′Y′, and Z′Z′Z′ each independently represent one motif of three identical modifications on three consecutive nucleotides.

[0292] In one embodiment, i is 0 and j is 0; or i is 1 and j is 0; or i is 0 and j is 1; or both i and j are 0; or both i and j are 1. In another embodiment, k is 0 and 1 is 0; or k is 1 and 1 is 0; k is 0 and 1 is 1; or both k and 1 are 0; or both k and 1 are 1.

[0293] Exemplary combinations of the sense strand and antisense strand forming an iRNA duplex include the formulas below:

5′nₚ-Nₐ—YYY—Nₐ-n_{q}3′

3′nₚ′-Nₐ′—Y′Y′Y′—Nₐ′n_{q}′5′ (IIIa)

5′nₚ-Nₐ—YYY—N_{b}—ZZZ—Nₐ-n_{q}′3′

3′nₚ′-Nₐ′—Y′Y′Y′—N_{b}′—Z′Z′Z′—Nₐ′n_{q}′5′ (IIIb)

5′nₚ-Nₐ—XXX—N_{b}—YYY—Nₐ-n_{q}′3′

3′nₚ′-Nₐ′—X′X′X′—N_{b}′—Y′Y′Y′—Nₐ′-n_{q}′5′ (IIIc)

5′nₚ-Nₐ—XXX—N_{b}—YYY—N_{b}—ZZZ—Nₐ-n_{q}3′

3′nₚ′-Nₐ′—X′X′X′—N_{b}′—Y′Y′Y′—N_{b}′—Z′Z′Z′—Nₐ-n_{q}′5′ (IIId)

[0294] When the dsRNAi agent is represented by formula (IIIa), each Nₐ independently represents an oligonucleotide sequence comprising 2-20, 2-15, or 2-10 modified nucleotides.

[0295] When the dsRNAi agent is represented by formula (IIIb), each N_{b} independently represents an oligonucleotide sequence comprising 1-10, 1-7, 1-5, or 1-4 modified nucleotides. Each Nₐ independently represents an oligonucleotide sequence comprising 2-20, 2-15, or 2-10 modified nucleotides.

[0296] When the dsRNAi agent is represented as formula (IIIc), each N_{b}, N_{b}′ independently represents an oligonucleotide sequence comprising 0-10, 0-7, 0-10, 0-7, 0-5, 0-4, 0-2, or 0 modified nucleotides. Each Nₐ independently represents an oligonucleotide sequence comprising 2-20, 2-15, or 2-10 modified nucleotides.

[0297] When the dsRNAi agent is represented as formula (IIId), each N_{b}, N_{b}′ independently represents an oligonucleotide sequence comprising 0-10, 0-7, 0-10, 0-7, 0-5, 0-4, 0-2, or 0 modified nucleotides. Each Nₐ, Nₐ′ independently represents an oligonucleotide sequence comprising 2-20, 2-15, or 2-10 modified nucleotides. Each of Nₐ, Nₐ′, N_{b}, and N_{b}′ independently comprises modifications of alternating pattern.

[0298] Each of X, Y, and Z in formulas (III), (IIIa), (IIIb), (IIIc), and (IIId) may be the same or different from each other.

[0299] When the dsRNAi agent is represented by formula (III), (IIIa), (IIIb), (IIIc), and (IIId), at least one of the Y nucleotides may form a base pair with one of the Y′ nucleotides. Alternatively, at least two of the Y nucleotides form base pairs with the corresponding Y′ nucleotides; or all three of the Y nucleotides all form base pairs with the corresponding Y′ nucleotides.

[0300] When the dsRNAi agent is represented by formula (IIIb) or (IIId), at least one of the Z nucleotides may form a base pair with one of the Z′ nucleotides. Alternatively, at least two of the Z nucleotides form base pairs with the corresponding Z′ nucleotides; or all three of the Z nucleotides all form base pairs with the corresponding Z′ nucleotides.

[0301] When the dsRNAi agent is represented as formula (IIIc) or (IIId), at least one of the X nucleotides may form a base pair with one of the X′ nucleotides. Alternatively, at least two of the X nucleotides form base pairs with the corresponding X′ nucleotides; or all three of the X nucleotides all form base pairs with the corresponding X′ nucleotides.

[0302] In certain embodiments, the modification on the Y nucleotide is different than the modification on the Y′ nucleotide, the modification on the Z nucleotide is different than the modification on the Z′ nucleotide, or the modification on the X nucleotide is different than the modification on the X′ nucleotide.

[0303] In certain embodiments, when the dsRNAi agent is represented by formula (IIId), the Nₐ modifications are 2′-O-methyl or 2′-fluoro modifications. In other embodiments, when the RNAi agent is represented by formula (IIId), the Nₐ modifications are 2′-O-methyl or 2′-fluoro modifications and nₚ′>0 and at least one nₚ′ is linked to a neighboring nucleotide a via phosphorothioate linkage. In yet other embodiments, when the RNAi agent is represented by formula (IIId), the Nₐ modifications are 2′-O-methyl or 2′-fluoro modifications, nₚ′>0 and at least one nₚ′ is linked to a neighboring nucleotide via phosphorothioate linkage, and the sense strand is conjugated to one or more GalNAc derivatives attached through a bivalent or trivalent branched linker (described below). In other embodiments, when the RNAi agent is represented by formula (IIId), the Nₐ modifications are 2′-O-methyl or 2′-fluoro modifications, nₚ′>0 and at least one nₚ′ is linked to a neighboring nucleotide via phosphorothioate linkage, the sense strand comprises at least one phosphorothioate linkage, and the sense strand is conjugated to one or more GalNAc derivatives attached through a bivalent or trivalent branched linker.

[0304] In some embodiments, when the dsRNAi agent is represented by formula (IIIa), the Nₐ modifications are 2′-O-methyl or 2′-fluoro modifications, nₚ′>0 and at least one nₚ′ is linked to a neighboring nucleotide via phosphorothioate linkage, the sense strand comprises at least one phosphorothioate linkage, and the sense strand is conjugated to one or more GalNAc derivatives attached through a bivalent or trivalent branched linker.

[0305] In some embodiments, the dsRNAi agent is a multimer containing at least two duplexes represented by formula (III), (IIIa), (IIIb), (IIIc), and (IIId), wherein the duplexes are connected by a linker. The linker can be cleavable or non-cleavable. Optionally, the multimer further comprises a ligand. Each of the duplexes can target the same gene or two different genes; or each of the duplexes can target same gene at two different target sites.

[0306] In some embodiments, the dsRNAi agent is a multimer containing three, four, five, six, or more duplexes represented by formula (III), (IIIa), (IIIb), (IIIc), and (IIId), wherein the duplexes are connected by a linker. The linker can be cleavable or non-cleavable. Optionally, the multimer further comprises a ligand. Each of the duplexes can target the same gene or two different genes; or each of the duplexes can target same gene at two different target sites.

[0307] In one embodiment, two dsRNAi agents represented by at least one of formulas (III), (IIIa), (IIIb), (IIIc), and (IIId) are linked to each other at the 5′ end, and one or both of the 3′ ends, and are optionally conjugated to a ligand. Each of the agents can target the same gene or two different genes; or each of the agents can target same gene at two different target sites.

[0308] In certain embodiments, an RNAi agent of the invention may contain a low number of nucleotides containing a 2′-fluoro modification, e.g., 10 or fewer nucleotides with 2′-fluoro modification. For example, the RNAi agent may contain 10, 9, 8, 7, 6, 5, 4, 3, 2, 1 or 0 nucleotides with a 2′-fluoro modification. In a specific embodiment, the RNAi agent of the invention contains 10 nucleotides with a 2′-fluoro modification, e.g., 4 nucleotides with a 2′-fluoro modification in the sense strand and 6 nucleotides with a 2′-fluoro modification in the antisense strand. In another specific embodiment, the RNAi agent of the invention contains 6 nucleotides with a 2′-fluoro modification, e.g., 4 nucleotides with a 2′-fluoro modification in the sense strand and 2 nucleotides with a 2′-fluoro modification in the antisense strand.

[0309] In other embodiments, an RNAi agent of the invention may contain an ultra low number of nucleotides containing a 2′-fluoro modification, e.g., 2 or fewer nucleotides containing a 2′-fluoro modification. For example, the RNAi agent may contain 2, 1 of 0 nucleotides with a 2′-fluoro modification. In a specific embodiment, the RNAi agent may contain 2 nucleotides with a 2′-fluoro modification, e.g., 0 nucleotides with a 2-fluoro modification in the sense strand and 2 nucleotides with a 2′-fluoro modification in the antisense strand.

[0310] Various publications describe multimeric iRNAs that can be used in the methods of the invention. Such publications include WO2007/091269, U.S. Pat. No. 7,858,769, WO2010/141511, WO2007/117686, WO2009/014887, and WO2011/031520 the entire contents of each of which are hereby incorporated herein by reference.

[0311] In certain embodiments, the compositions and methods of the disclosure include a vinyl phosphonate (VP) modification of an RNAi agent as described herein. In exemplary embodiments, a 5′ vinyl phosphonate modified nucleotide of the disclosure has the structure:

[chemical structure]

wherein X is O or S;
[0312] R is hydrogen, hydroxy, fluoro, or C₁₋₂₀alkoxy (e.g., methoxy or n-hexadecyloxy);
[0313] R^{5′} is ═C(H)—P(O)(OH)₂ and the double bond between the C5′ carbon and R^{5′} is in the E or Z orientation (e.g., E orientation); and
[0314] B is a nucleobase or a modified nucleobase, optionally where B is adenine, guanine, cytosine, thymine, or uracil.

[0315] In one embodiment, R^{5′} is ═C(H)—P(O)(OH)₂ and the double bond between the C5′ carbon and R5′ is in the E orientation. In another embodiment, R is methoxy and R^{5′} is ═C(H)—P(O)(OH)₂ and the double bond between the C5′ carbon and R5′ is in the E orientation. In another embodiment, X is S, R is methoxy, and R^{5′} is ═C(H)—P(O)(OH)₂ and the double bond between the C5′ carbon and R5′ is in the E orientation.

[0316] A vinyl phosphonate of the instant disclosure may be attached to either the antisense or the sense strand of a dsRNA of the disclosure. In certain embodiments, a vinyl phosphonate of the instant disclosure is attached to the antisense strand of a dsRNA, optionally at the 5′ end of the antisense strand of the dsRNA.

[0317] Vinyl phosphonate modifications are also contemplated for the compositions and methods of the instant disclosure. An exemplary vinyl phosphonate structure includes the preceding structure, where R5′ is ═C(H)—OP(O)(OH)2 and the double bond between the C5′ carbon and R5′ is in the E or Z orientation (e.g., E orientation).

[0318] As described in more detail below, the iRNA that contains conjugations of one or more carbohydrate moieties to an iRNA can optimize one or more properties of the iRNA. In many cases, the carbohydrate moiety will be attached to a modified subunit of the iRNA. For example, the ribose sugar of one or more ribonucleotide subunits of a iRNA can be replaced with another moiety, e.g., a non-carbohydrate (such as, cyclic) carrier to which is attached a carbohydrate ligand. A ribonucleotide subunit in which the ribose sugar of the subunit has been so replaced is referred to herein as a ribose replacement modification subunit (RRMS). A cyclic carrier may be a carbocyclic ring system, i.e., all ring atoms are carbon atoms, or a heterocyclic ring system, i.e., one or more ring atoms may be a heteroatom, e.g., nitrogen, oxygen, sulfur. The cyclic carrier may be a monocyclic ring system, or may contain two or more rings, e.g. fused rings. The cyclic carrier may be a fully saturated ring system, or it may contain one or more double bonds.

[0319] The ligand may be attached to the polynucleotide via a carrier. The carriers include (i) at least one “backbone attachment point,” such as, two “backbone attachment points” and (ii) at least one “tethering attachment point.” A “backbone attachment point” as used herein refers to a functional group, e.g. a hydroxyl group, or generally, a bond available for, and that is suitable for incorporation of the carrier into the backbone, e.g., the phosphate, or modified phosphate, e.g., sulfur containing, backbone, of a ribonucleic acid. A “tethering attachment point” (TAP) in some embodiments refers to a constituent ring atom of the cyclic carrier, e.g., a carbon atom or a heteroatom (distinct from an atom which provides a backbone attachment point), that connects a selected moiety. The moiety can be, e.g., a carbohydrate, e.g. monosaccharide, disaccharide, trisaccharide, tetrasaccharide, oligosaccharide, or polysaccharide. Optionally, the selected moiety is connected by an intervening tether to the cyclic carrier. Thus, the cyclic carrier will often include a functional group, e.g., an amino group, or generally, provide a bond, that is suitable for incorporation or tethering of another chemical entity, e.g., a ligand to the constituent ring.

[0320] The iRNA may be conjugated to a ligand via a carrier, wherein the carrier can be cyclic group or acyclic group. In one embodiment, the cyclic group is selected from pyrrolidinyl, pyrazolinyl, pyrazolidinyl, imidazolinyl, imidazolidinyl, piperidinyl, piperazinyl, [1,3]dioxolane, oxazolidinyl, isoxazolidinyl, morpholinyl, thiazolidinyl, isothiazolidinyl, quinoxalinyl, pyridazinonyl, tetrahydrofuryl, and decalin. In one embodiment, the acyclic group is a serinol backbone or diethanolamine backbone.

i. Thermally Destabilizing Modifications

[0321] In certain embodiments, a dsRNA molecule can be optimized for RNA interference by incorporating thermally destabilizing modifications in the seed region of the antisense strand. As used herein “seed region” means at positions 2-9 of the 5′-end of the referenced strand. For example, thermally destabilizing modifications can be incorporated in the seed region of the antisense strand to reduce or inhibit off-target gene silencing.

[0322] The term “thermally destabilizing modification(s)” includes modification(s) that would result with a dsRNA with a lower overall melting temperature (Tₘ) than the Tₘ of the dsRNA without having such modification(s). For example, the thermally destabilizing modification(s) can decrease the Tₘ of the dsRNA by 1-4° C., such as one, two, three or four degrees Celcius. And, the term “thermally destabilizing nucleotide” refers to a nucleotide containing one or more thermally destabilizing modifications.

[0323] It has been discovered that dsRNAs with an antisense strand comprising at least one thermally destabilizing modification of the duplex within the first 9 nucleotide positions, counting from the 5′ end, of the antisense strand have reduced off-target gene silencing activity. Accordingly, in some embodiments, the antisense strand comprises at least one (e.g., one, two, three, four, five or more) thermally destabilizing modification of the duplex within the first 9 nucleotide positions of the 5′ region of the antisense strand. In some embodiments, one or more thermally destabilizing modification(s) of the duplex is/are located in positions 2-9, such as, positions 4-8, from the 5′-end of the antisense strand. In some further embodiments, the thermally destabilizing modification(s) of the duplex is/are located at position 6, 7 or 8 from the 5′-end of the antisense strand. In still some further embodiments, the thermally destabilizing modification of the duplex is located at position 7 from the 5′-end of the antisense strand. In some embodiments, the thermally destabilizing modification of the duplex is located at position 2, 3, 4, 5 or 9 from the 5′-end of the antisense strand.

[0324] An iRNA agent comprises a sense strand and an antisense strand, each strand having 14 to 40 nucleotides. The RNAi agent may be represented by formula (L):

[chemical structure]

[0325] In formula (L), B1, B2, B3, B1′, B2′, B3′, and B4′ each are independently a nucleotide containing a modification selected from the group consisting of 2′-O-alkyl, 2′-substituted alkoxy, 2′-substituted alkyl, 2′-halo, ENA, and BNA/LNA. In one embodiment, B1, B2, B3, B1′, B2′, B3′, and B4′ each contain 2′-OMe modifications. In one embodiment, B1, B2, B3, B1′, B2′, B3′, and B4′ each contain 2′-OMe or 2′-F modifications. In one embodiment, at least one of B1, B2, B3, B1′, B2′, B3′, and B4′ contain 2′-O—N-methylacetamido (2′-O-NMA, 2′O—CH2C(O)N(Me)H) modification.

[0326] C1 is a thermally destabilizing nucleotide placed at a site opposite to the seed region of the antisense strand (i.e., at positions 2-8 of the 5′-end of the antisense strand). For example, C1 is at a position of the sense strand that pairs with a nucleotide at positions 2-8 of the 5′-end of the antisense strand. In one example, C1 is at position 15 from the 5′-end of the sense strand. C1 nucleotide bears the thermally destabilizing modification which can include abasic modification; mismatch with the opposing nucleotide in the duplex; and sugar modification such as 2′-deoxy modification or acyclic nucleotide e.g., unlocked nucleic acids (UNA); glycerol nucleic acid (GNA); and 2′-5′-linked ribonucleotides (“3′-RNA”). In one embodiment, C1 has thermally destabilizing modification selected from the group consisting of: i) mismatch with the opposing nucleotide in the antisense strand; ii) abasic modification selected from the group consisting of:

[chemical structure]

and iii) sugar modification selected from the group consisting of:

[chemical structure]

wherein B is a modified or unmodified nucleobase, R¹ and R² independently are H, halogen, OR₃, or alkyl; and R₃ is H, alkyl, cycloalkyl, aryl, aralkyl, heteroaryl or sugar. In one embodiment, the thermally destabilizing modification in C1 is a mismatch selected from the group consisting of G:G, G:A, G:U, G:T, A:A, A:C, C:C, C:U, C:T, U:U, T:T, and U:T; and optionally, at least one nucleobase in the mismatch pair is a 2′-deoxy nucleobase. In one example, the thermally destabilizing modification in C1 is GNA or

[chemical structure]

T1, T1′, T2′, and T3′ each independently represent a nucleotide comprising a modification providing the nucleotide a steric bulk that is less or equal to the steric bulk of a 2′-OMe modification. A steric bulk refers to the sum of steric effects of a modification. Methods for determining steric effects of a modification of a nucleotide are known to one skilled in the art. The modification can be at the 2′ position of a ribose sugar of the nucleotide, or a modification to a non-ribose nucleotide, acyclic nucleotide, or the backbone of the nucleotide that is similar or equivalent to the 2′ position of the ribose sugar, and provides the nucleotide a steric bulk that is less than or equal to the steric bulk of a 2′-OMe modification. For example, T1, T1′, T2′, and T3′ are each independently selected from DNA, RNA, LNA, 2′-F, and 2′-F-5′-methyl. In one embodiment, T1 is DNA. In one embodiment, T1′ is DNA, RNA or LNA. In one embodiment, T2′ is DNA or RNA. In one embodiment, T3′ is DNA or RNA.
[0327] n¹, n³, and q¹ are independently 4 to 15 nucleotides in length.
[0328] n⁵, q³, and q⁷ are independently 1-6 nucleotide(s) in length.
[0329] n⁴, q², and q⁶ are independently 1-3 nucleotide(s) in length; alternatively, n⁴ is 0.
[0330] q⁵ is independently 0-10 nucleotide(s) in length.
[0331] n² and q⁴ are independently 0-3 nucleotide(s) in length.

[0332] Alternatively, n⁴ is 0-3 nucleotide(s) in length.

[0333] In one embodiment, n⁴ can be 0. In one example, n⁴ is 0, and q² and q⁶ are 1. In another example, n⁴ is 0, and q² and q⁶ are 1, with two phosphorothioate internucleotide linkage modifications within position 1-5 of the sense strand (counting from the 5′-end of the sense strand), and two phosphorothioate internucleotide linkage modifications at positions 1 and 2 and two phosphorothioate internucleotide linkage modifications within positions 18-23 of the antisense strand (counting from the 5′-end of the antisense strand).

[0334] In one embodiment, n⁴, q², and q⁶ are each 1.

[0335] In one embodiment, n², n⁴, q², q⁴, and q⁶ are each 1.

[0336] In one embodiment, C1 is at position 14-17 of the 5′-end of the sense strand, when the sense strand is 19-22 nucleotides in length, and n⁴ is 1. In one embodiment, C1 is at position 15 of the 5′-end of the sense strand

[0337] In one embodiment, T3′ starts at position 2 from the 5′ end of the antisense strand. In one example, T3′ is at position 2 from the 5′ end of the antisense strand and q⁶ is equal to 1.

[0338] In one embodiment, T1′ starts at position 14 from the 5′ end of the antisense strand. In one example, T1′ is at position 14 from the 5′ end of the antisense strand and q² is equal to 1.

[0339] In an exemplary embodiment, T3′ starts from position 2 from the 5′ end of the antisense strand and T1′ starts from position 14 from the 5′ end of the antisense strand. In one example, T3′ starts from position 2 from the 5′ end of the antisense strand and q⁶ is equal to 1 and T1′ starts from position 14 from the 5′ end of the antisense strand and q² is equal to 1.

[0340] In one embodiment, T1′ and T3′ are separated by 11 nucleotides in length (i.e. not counting the T1′ and T3′ nucleotides).

[0341] In one embodiment, T1′ is at position 14 from the 5′ end of the antisense strand. In one example, T1′ is at position 14 from the 5′ end of the antisense strand and q² is equal to 1, and the modification at the 2′ position or positions in a non-ribose, acyclic or backbone that provide less steric bulk than a 2′-OMe ribose.

[0342] In one embodiment, T3′ is at position 2 from the 5′ end of the antisense strand. In one example, T3′ is at position 2 from the 5′ end of the antisense strand and q⁶ is equal to 1, and the modification at the 2′ position or positions in a non-ribose, acyclic or backbone that provide less than or equal to steric bulk than a 2′-OMe ribose.

[0343] In one embodiment, T1 is at the cleavage site of the sense strand. In one example, T1 is at position 11 from the 5′ end of the sense strand, when the sense strand is 19-22 nucleotides in length, and n² is 1. In an exemplary embodiment, T1 is at the cleavage site of the sense strand at position 11 from the 5′ end of the sense strand, when the sense strand is 19-22 nucleotides in length, and n² is 1,

In one embodiment, T2′ starts at position 6 from the 5′ end of the antisense strand. In one example, T2′ is at positions 6-10 from the 5′ end of the antisense strand, and q⁴ is 1.

[0344] In an exemplary embodiment, T1 is at the cleavage site of the sense strand, for instance, at position 11 from the 5′ end of the sense strand, when the sense strand is 19-22 nucleotides in length, and n² is 1; T1′ is at position 14 from the 5′ end of the antisense strand, and q² is equal to 1, and the modification to T1′ is at the 2′ position of a ribose sugar or at positions in a non-ribose, acyclic or backbone that provide less steric bulk than a 2′-OMe ribose; T2′ is at positions 6-10 from the 5′ end of the antisense strand, and q⁴ is 1; and T3′ is at position 2 from the 5′ end of the antisense strand, and q⁶ is equal to 1, and the modification to T3′ is at the 2′ position or at positions in a non-ribose, acyclic or backbone that provide less than or equal to steric bulk than a 2′-OMe ribose.

In one embodiment, T2′ starts at position 8 from the 5′ end of the antisense strand. In one example, T2′ starts at position 8 from the 5′ end of the antisense strand, and q⁴ is 2.

[0345] In one embodiment, T2′ starts at position 9 from the 5′ end of the antisense strand. In one example, T2′ is at position 9 from the 5′ end of the antisense strand, and q⁴ is 1.

[0346] In one embodiment, B1′ is 2′-OMe or 2′-F, q¹ is 9, T1′ is 2′-F, q² is 1, B2′ is 2′-OMe or 2′-F, q³ is 4, T2′ is 2′-F, q⁴ is 1, B3′ is 2′-OMe or 2′-F, q⁵ is 6, T3′ is 2′-F, q⁶ is 1, B4′ is 2′-OMe, and q⁷ is 1; with two phosphorothioate internucleotide linkage modifications within positions 1-5 of the sense strand (counting from the 5′-end of the sense strand), and two phosphorothioate internucleotide linkage modifications at positions 1 and 2 and two phosphorothioate internucleotide linkage modifications within positions 18-23 of the antisense strand (counting from the 5′-end of the antisense strand).

[0347] In one embodiment, n⁴ is 0, B3 is 2′-OMe, n⁵ is 3, B1′ is 2′-OMe or 2′-F, q¹ is 9, T1′ is 2′-F, q² is 1, B2′ is 2′-OMe or 2′-F, q³ is 4, T2′ is 2′-F, q⁴ is 1, B3′ is 2′-OMe or 2′-F, q⁵ is 6, T3′ is 2′-F, q⁶ is 1, B4′ is 2′-OMe, and q⁷ is 1; with two phosphorothioate internucleotide linkage modifications within positions 1-5 of the sense strand (counting from the 5′-end of the sense strand), and two phosphorothioate internucleotide linkage modifications at positions 1 and 2 and two phosphorothioate internucleotide linkage modifications within positions 18-23 of the antisense strand (counting from the 5′-end of the antisense strand).

[0348] In one embodiment, B1 is 2′-OMe or 2′-F, n¹ is 8, T1 is 2′F, n² is 3, B2 is 2′-OMe, n³ is 7, n⁴ is 0, B3 is 2′OMe, n⁵ is 3, B1′ is 2′-OMe or 2′-F, q¹ is 9, T1′ is 2′-F, q² is 1, B2′ is 2′-OMe or 2′-F, q³ is 4, T2′ is 2′-F, q⁴ is 2, B3′ is 2′-OMe or 2′-F, q⁵ is 5, T3′ is 2′-F, q⁶ is 1, B4′ is 2′-OMe, and q⁷ is 1.

[0349] In one embodiment, B1 is 2′-OMe or 2′-F, n¹ is 8, T1 is 2′F, n² is 3, B2 is 2′-OMe, n³ is 7, n⁴ is 0, B3 is 2′-OMe, n⁵ is 3, B1′ is 2′-OMe or 2′-F, q¹ is 9, T1′ is 2′-F, q² is 1, B2′ is 2′-OMe or 2′-F, q³ is 4, T2′ is 2′-F, q⁴ is 2, B3′ is 2′-OMe or 2′-F, q⁵ is 5, T3′ is 2′-F, q⁶ is 1, B4′ is 2′-OMe, and q⁷ is 1; with two phosphorothioate internucleotide linkage modifications within positions 1-5 of the sense strand (counting from the 5′-end of the sense strand), and two phosphorothioate internucleotide linkage modifications at positions 1 and 2 and two phosphorothioate internucleotide linkage modifications within positions 18-23 of the antisense strand (counting from the 5′-end of the antisense strand).

[0350] In one embodiment, B1 is 2′-OMe or 2′-F, n¹ is 6, T1 is 2′F, n² is 3, B2 is 2′-OMe, n³ is 7, n⁴ is 0, B3 is 2′OMe, n⁵ is 3, B1′ is 2′-OMe or 2′-F, q¹ is 7, T1′ is 2′-F, q² is 1, B2′ is 2′-OMe or 2′-F, q³ is 4, T2′ is 2′-F, q⁴ is 2, B3′ is 2′-OMe or 2′-F, q⁵ is 5, T3′ is 2′-F, q⁶ is 1, B4′ is 2′-OMe, and q⁷ is 1.

[0351] In one embodiment, B1 is 2′-OMe or 2′-F, n¹ is 6, T1 is 2′F, n² is 3, B2 is 2′-OMe, n³ is 7, n⁴ is 0, B3 is 2′-OMe, n⁵ is 3, B1′ is 2′-OMe or 2′-F, q¹ is 7, T1′ is 2′-F, q² is 1, B2′ is 2′-OMe or 2′-F, q³ is 4, T2′ is 2′-F, q⁴ is 2, B3′ is 2′-OMe or 2′-F, q⁵ is 5, T3′ is 2′-F, q⁶ is 1, B4′ is 2′-OMe, and q⁷ is 1; with two phosphorothioate internucleotide linkage modifications within positions 1-5 of the sense strand (counting from the 5′-end of the sense strand), and two phosphorothioate internucleotide linkage modifications at positions 1 and 2 and two phosphorothioate internucleotide linkage modifications within positions 18-23 of the antisense strand (counting from the 5′-end of the antisense strand).

[0352] In one embodiment, B1 is 2′-OMe or 2′-F, n¹ is 8, T1 is 2′F, n² is 3, B2 is 2′-OMe, n³ is 7, n⁴ is 0, B3 is 2′OMe, n⁵ is 3, B1′ is 2′-OMe or 2′-F, q¹ is 9, T1′ is 2′-F, q² is 1, B2′ is 2′-OMe or 2′-F, q³ is 4, T2′ is 2′-F, q⁴ is 1, B3′ is 2′-OMe or 2′-F, q⁵ is 6, T3′ is 2′-F, q⁶ is 1, B4′ is 2′-OMe, and q⁷ is 1.

In one embodiment, B1 is 2′-OMe or 2′-F, n¹ is 8, T1 is 2′F, n² is 3, B2 is 2′-OMe, n³ is 7, n⁴ is 0, B3 is 2′-OMe, n⁵ is 3, B1′ is 2′-OMe or 2′-F, q¹ is 9, T1′ is 2′-F, q² is 1, B2′ is 2′-OMe or 2′-F, q³ is 4, T2′ is 2′-F, q⁴ is 1, B3′ is 2′-OMe or 2′-F, q⁵ is 6, T3′ is 2′-F, q⁶ is 1, B4′ is 2′-OMe, and q⁷ is 1; with two phosphorothioate internucleotide linkage modifications within positions 1-5 of the sense strand (counting from the 5′-end of the sense strand), and two phosphorothioate internucleotide linkage modifications at positions 1 and 2 and two phosphorothioate internucleotide linkage modifications within positions 18-23 of the antisense strand (counting from the 5′-end of the antisense strand).

[0353] In one embodiment, B1 is 2′-OMe or 2′-F, n¹ is 8, T1 is 2′F, n² is 3, B2 is 2′-OMe, n³ is 7, n⁴ is 0, B3 is 2′OMe, n⁵ is 3, B1′ is 2′-OMe or 2′-F, q¹ is 9, T1′ is 2′-F, q² is 1, B2′ is 2′-OMe or 2′-F, q³ is 5, T2′ is 2′-F, q⁴ is 1, B3′ is 2′-OMe or 2′-F, q⁵ is 5, T3′ is 2′-F, q⁶ is 1, B4′ is 2′-OMe, and q⁷ is 1; optionally with at least 2 additional TT at the 3′-end of the antisense strand.

In one embodiment, B1 is 2′-OMe or 2′-F, n¹ is 8, T1 is 2′F, n² is 3, B2 is 2′-OMe, n³ is 7, n⁴ is 0, B3 is 2′-OMe, n⁵ is 3, B1′ is 2′-OMe or 2′-F, q¹ is 9, T1′ is 2′-F, q² is 1, B2′ is 2′-OMe or 2′-F, q³ is 5, T2′ is 2′-F, q⁴ is 1, B3′ is 2′-OMe or 2′-F, q⁵ is 5, T3′ is 2′-F, q⁶ is 1, B4′ is 2′-OMe, and q⁷ is 1; optionally with at least 2 additional TT at the 3′-end of the antisense strand; with two phosphorothioate internucleotide linkage modifications within positions 1-5 of the sense strand (counting from the 5′-end of the sense strand), and two phosphorothioate internucleotide linkage modifications at positions 1 and 2 and two phosphorothioate internucleotide linkage modifications within positions 18-23 of the antisense strand (counting from the 5′-end of the antisense strand).

[0354] In one embodiment, B1 is 2′-OMe or 2′-F, n¹ is 8, T1 is 2′F, n² is 3, B2 is 2′-OMe, n³ is 7, n⁴ is 0, B3 is 2′-OMe, n⁵ is 3, B1′ is 2′-OMe or 2′-F, q¹ is 9, T1′ is 2′-F, q² is 1, B2′ is 2′-OMe or 2′-F, q³ is 4, q⁴ is 0, B3′ is 2′-OMe or 2′-F, q⁵ is 7, T3′ is 2′-F, q⁶ is 1, B4′ is 2′-OMe, and q⁷ is 1.

[0355] In one embodiment, B1 is 2′-OMe or 2′-F, n¹ is 8, T1 is 2′F, n² is 3, B2 is 2′-OMe, n³ is 7, n⁴ is 0, B3 is 2′-OMe, n⁵ is 3, B1′ is 2′-OMe or 2′-F, q¹ is 9, T1′ is 2′-F, q² is 1, B2′ is 2′-OMe or 2′-F, q³ is 4, q⁴ is 0, B3′ is 2′-OMe or 2′-F, q⁵ is 7, T3′ is 2′-F, q⁶ is 1, B4′ is 2′-OMe, and q⁷ is 1; with two phosphorothioate internucleotide linkage modifications within positions 1-5 of the sense strand (counting from the 5′-end), and two phosphorothioate internucleotide linkage modifications at positions 1 and 2 and two phosphorothioate internucleotide linkage modifications within positions 18-23 of the antisense strand (counting from the 5′-end).

[0356] In one embodiment, B1 is 2′-OMe or 2′-F, n¹ is 8, T1 is 2′F, n² is 3, B2 is 2′-OMe, n³ is 7, n⁴ is 0, B3 is 2′OMe, n⁵ is 3, B1′ is 2′-OMe or 2′-F, q¹ is 9, T1′ is 2′-F, q² is 1, B2′ is 2′-OMe or 2′-F, q³ is 4, T2′ is 2′-F, q⁴ is 2, B3′ is 2′-OMe or 2′-F, q⁵ is 5, T3′ is 2′-F, q⁶ is 1, B4′ is 2′-F, and q⁷ is 1.

[0357] In one embodiment, B1 is 2′-OMe or 2′-F, n¹ is 8, T1 is 2′F, n² is 3, B2 is 2′-OMe, n³ is 7, n⁴ is 0, B3 is 2′-OMe, n⁵ is 3, B1′ is 2′-OMe or 2′-F, q¹ is 9, T1′ is 2′-F, q² is 1, B2′ is 2′-OMe or 2′-F, q³ is 4, T2′ is 2′-F, q⁴ is 2, B3′ is 2′-OMe or 2′-F, q⁵ is 5, T3′ is 2′-F, q⁶ is 1, B4′ is 2′-F, and q⁷ is 1; with two phosphorothioate internucleotide linkage modifications within positions 1-5 of the sense strand (counting from the 5′-end of the sense strand), and two phosphorothioate internucleotide linkage modifications at positions 1 and 2 and two phosphorothioate internucleotide linkage modifications within positions 18-23 of the antisense strand (counting from the 5′-end of the antisense strand).

[0358] In one embodiment, B1 is 2′-OMe or 2′-F, n¹ is 8, T1 is 2′F, n² is 3, B2 is 2′-OMe, n³ is 7, n⁴ is 0, B3 is 2′-OMe, n⁵ is 3, B1′ is 2′-OMe or 2′-F, q¹ is 9, T1′ is 2′-F, q² is 1, B2′ is 2′-OMe or 2′-F, q³ is 4, q⁴ is 0, B3′ is 2′-OMe or 2′-F, q⁵ is 7, T3′ is 2′-F, q⁶ is 1, B4′ is 2′-F, and q⁷ is 1.

[0359] In one embodiment, B1 is 2′-OMe or 2′-F, n¹ is 8, T1 is 2′F, n² is 3, B2 is 2′-OMe, n³ is 7, n⁴ is 0, B3 is 2′-OMe, n⁵ is 3, B1′ is 2′-OMe or 2′-F, q¹ is 9, T1′ is 2′-F, q² is 1, B2′ is 2′-OMe or 2′-F, q³ is 4, q⁴ is 0, B3′ is 2′-OMe or 2′-F, q⁵ is 7, T3′ is 2′-F, q⁶ is 1, B4′ is 2′-F, and q⁷ is 1; with two phosphorothioate internucleotide linkage modifications within positions 1-5 of the sense strand (counting from the 5′-end of the sense strand), and two phosphorothioate internucleotide linkage modifications at positions 1 and 2 and two phosphorothioate internucleotide linkage modifications within positions 18-23 of the antisense strand (counting from the 5′-end of the antisense strand).

[0360] The RNAi agent can comprise a phosphorus-containing group at the 5′-end of the sense strand or antisense strand. The 5′-end phosphorus-containing group can be 5′-end phosphate (5′-P), 5′-end phosphorothioate (5′-PS), 5′-end phosphorodithioate (5′-PS₂), 5′-end vinylphosphonate (5′-VP), 5′-end methylphosphonate (MePhos), or 5′-deoxy-5′-C-malonyl

[chemical structure]

When the 5′-end phosphorus-containing group is 5′-end vinylphosphonate (5′-VP), the 5′-VP can be either 5′-E-VP isomer (i.e., trans-vinylphosphonate,

[chemical structure]

5′-Z-VP isomer (i.e., cis-vinylphosphonate,

[chemical structure]

or mixtures thereof.

[0361] In one embodiment, the RNAi agent comprises a phosphorus-containing group at the 5′-end of the sense strand. In one embodiment, the RNAi agent comprises a phosphorus-containing group at the 5′-end of the antisense strand.

[0362] In one embodiment, the RNAi agent comprises a 5′-P. In one embodiment, the RNAi agent comprises a 5′-P in the antisense strand.

[0363] In one embodiment, the RNAi agent comprises a 5′-PS. In one embodiment, the RNAi agent comprises a 5′-PS in the antisense strand.

[0364] In one embodiment, the RNAi agent comprises a 5′-VP. In one embodiment, the RNAi agent comprises a 5′-VP in the antisense strand. In one embodiment, the RNAi agent comprises a 5′-E-VP in the antisense strand. In one embodiment, the RNAi agent comprises a 5′-Z-VP in the antisense strand.

[0365] In one embodiment, the RNAi agent comprises a 5′-PS₂. In one embodiment, the RNAi agent comprises a 5′-PS₂ in the antisense strand.

[0366] In one embodiment, the RNAi agent comprises a 5′-PS₂. In one embodiment, the RNAi agent comprises a 5′-deoxy-5′-C-malonyl in the antisense strand.

In one embodiment, B1 is 2′-OMe or 2′-F, n¹ is 8, T1 is 2′F, n² is 3, B2 is 2′-OMe, n³ is 7, n⁴ is 0, B3 is 2′OMe, n⁵ is 3, B1′ is 2′-OMe or 2′-F, q¹ is 9, T1′ is 2′-F, q² is 1, B2′ is 2′-OMe or 2′-F, q³ is 4, T2′ is 2′-F, q⁴ is 2, B3′ is 2′-OMe or 2′-F, q⁵ is 5, T3′ is 2′-F, q⁶ is 1, B4′ is 2′-OMe, and q⁷ is 1. The RNAi agent also comprises a 5′-PS.

[0367] In one embodiment, B1 is 2′-OMe or 2′-F, n¹ is 8, T1 is 2′F, n² is 3, B2 is 2′-OMe, n³ is 7, n⁴ is 0, B3 is 2′OMe, n⁵ is 3, B1′ is 2′-OMe or 2′-F, q¹ is 9, T1′ is 2′-F, q² is 1, B2′ is 2′-OMe or 2′-F, q³ is 4, T2′ is 2′-F, q⁴ is 2, B3′ is 2′-OMe or 2′-F, q⁵ is 5, T3′ is 2′-F, q⁶ is 1, B4′ is 2′-OMe, and q⁷ is 1. The RNAi agent also comprises a 5′-P.

[0368] In one embodiment, B1 is 2′-OMe or 2′-F, n¹ is 8, T1 is 2′F, n² is 3, B2 is 2′-OMe, n³ is 7, n⁴ is 0, B3 is 2′OMe, n⁵ is 3, B1′ is 2′-OMe or 2′-F, q¹ is 9, T1′ is 2′-F, q² is 1, B2′ is 2′-OMe or 2′-F, q³ is 4, T2′ is 2′-F, q⁴ is 2, B3′ is 2′-OMe or 2′-F, q⁵ is 5, T3′ is 2′-F, q⁶ is 1, B4′ is 2′-OMe, and q⁷ is 1. The RNAi agent also comprises a 5′-VP. The 5′-VP may be 5′-E-VP, 5′-Z-VP, or combination thereof.

[0369] In one embodiment, B1 is 2′-OMe or 2′-F, n¹ is 8, T1 is 2′F, n² is 3, B2 is 2′-OMe, n³ is 7, n⁴ is 0, B3 is 2′OMe, n⁵ is 3, B1′ is 2′-OMe or 2′-F, q¹ is 9, T1′ is 2′-F, q² is 1, B2′ is 2′-OMe or 2′-F, q³ is 4, T2′ is 2′-F, q⁴ is 2, B3′ is 2′-OMe or 2′-F, q⁵ is 5, T3′ is 2′-F, q⁶ is 1, B4′ is 2′-OMe, and q⁷ is 1. The RNAi agent also comprises a 5′-PS₂.

[0370] In one embodiment, B1 is 2′-OMe or 2′-F, n¹ is 8, T1 is 2′F, n² is 3, B2 is 2′-OMe, n³ is 7, n⁴ is 0, B3 is 2′OMe, n⁵ is 3, B1′ is 2′-OMe or 2′-F, q¹ is 9, T1′ is 2′-F, q² is 1, B2′ is 2′-OMe or 2′-F, q³ is 4, T2′ is 2′-F, q⁴ is 2, B3′ is 2′-OMe or 2′-F, q⁵ is 5, T3′ is 2′-F, q⁶ is 1, B4′ is 2′-OMe, and q⁷ is 1. The RNAi agent also comprises a 5′-deoxy-5′-C-malonyl.

[0371] In one embodiment, B1 is 2′-OMe or 2′-F, n¹ is 8, T1 is 2′F, n² is 3, B2 is 2′-OMe, n³ is 7, n⁴ is 0, B3 is 2′-OMe, n⁵ is 3, B1′ is 2′-OMe or 2′-F, q¹ is 9, T1′ is 2′-F, q² is 1, B2′ is 2′-OMe or 2′-F, q³ is 4, T2′ is 2′-F, q⁴ is 2, B3′ is 2′-OMe or 2′-F, q⁵ is 5, T3′ is 2′-F, q⁶ is 1, B4′ is 2′-OMe, and q⁷ is 1; with two phosphorothioate internucleotide linkage modifications within position 1-5 of the sense strand (counting from the 5′-end of the sense strand), and two phosphorothioate internucleotide linkage modifications at positions 1 and 2 and two phosphorothioate internucleotide linkage modifications within positions 18-23 of the antisense strand (counting from the 5′-end of the antisense strand). The RNAi agent also comprises a 5′-P.

[0372] In one embodiment, B1 is 2′-OMe or 2′-F, n¹ is 8, T1 is 2′F, n² is 3, B2 is 2′-OMe, n³ is 7, n⁴ is 0, B3 is 2′-OMe, n⁵ is 3, B1′ is 2′-OMe or 2′-F, q¹ is 9, T1′ is 2′-F, q² is 1, B2′ is 2′-OMe or 2′-F, q³ is 4, T2′ is 2′-F, q⁴ is 2, B3′ is 2′-OMe or 2′-F, q⁵ is 5, T3′ is 2′-F, q⁶ is 1, B4′ is 2′-OMe, and q⁷ is 1; with two phosphorothioate internucleotide linkage modifications within position 1-5 of the sense strand (counting from the 5′-end of the sense strand), and two phosphorothioate internucleotide linkage modifications at positions 1 and 2 and two phosphorothioate internucleotide linkage modifications within positions 18-23 of the antisense strand (counting from the 5′-end of the antisense strand). The RNAi agent also comprises a 5′-PS.

[0373] In one embodiment, B1 is 2′-OMe or 2′-F, n¹ is 8, T1 is 2′F, n² is 3, B2 is 2′-OMe, n³ is 7, n⁴ is 0, B3 is 2′-OMe, n⁵ is 3, B1′ is 2′-OMe or 2′-F, q¹ is 9, T1′ is 2′-F, q² is 1, B2′ is 2′-OMe or 2′-F, q³ is 4, T2′ is 2′-F, q⁴ is 2, B3′ is 2′-OMe or 2′-F, q⁵ is 5, T3′ is 2′-F, q⁶ is 1, B4′ is 2′-OMe, and q⁷ is 1; with two phosphorothioate internucleotide linkage modifications within position 1-5 of the sense strand (counting from the 5′-end of the sense strand), and two phosphorothioate internucleotide linkage modifications at positions 1 and 2 and two phosphorothioate internucleotide linkage modifications within positions 18-23 of the antisense strand (counting from the 5′-end of the antisense strand). The RNAi agent also comprises a 5′-VP. The 5′-VP may be 5′-E-VP, 5′-Z-VP, or combination thereof.

In one embodiment, B1 is 2′-OMe or 2′-F, n¹ is 8, T1 is 2′F, n² is 3, B2 is 2′-OMe, n³ is 7, n⁴ is 0, B3 is 2′-OMe, n⁵ is 3, B1′ is 2′-OMe or 2′-F, q¹ is 9, T1′ is 2′-F, q² is 1, B2′ is 2′-OMe or 2′-F, q³ is 4, T2′ is 2′-F, q⁴ is 2, B3′ is 2′-OMe or 2′-F, q⁵ is 5, T3′ is 2′-F, q⁶ is 1, B4′ is 2′-OMe, and q⁷ is 1; with two phosphorothioate internucleotide linkage modifications within position 1-5 of the sense strand (counting from the 5′-end of the sense strand), and two phosphorothioate internucleotide linkage modifications at positions 1 and 2 and two phosphorothioate internucleotide linkage modifications within positions 18-23 of the antisense strand (counting from the 5′-end of the antisense strand). The RNAi agent also comprises a 5′-PS₂.

[0374] In one embodiment, B1 is 2′-OMe or 2′-F, n¹ is 8, T1 is 2′F, n² is 3, B2 is 2′-OMe, n³ is 7, n⁴ is 0, B3 is 2′-OMe, n⁵ is 3, B1′ is 2′-OMe or 2′-F, q¹ is 9, T1′ is 2′-F, q² is 1, B2′ is 2′-OMe or 2′-F, q³ is 4, T2′ is 2′-F, q⁴ is 2, B3′ is 2′-OMe or 2′-F, q⁵ is 5, T3′ is 2′-F, q⁶ is 1, B4′ is 2′-OMe, and q⁷ is 1; with two phosphorothioate internucleotide linkage modifications within position 1-5 of the sense strand (counting from the 5′-end of the sense strand), and two phosphorothioate internucleotide linkage modifications at positions 1 and 2 and two phosphorothioate internucleotide linkage modifications within positions 18-23 of the antisense strand (counting from the 5′-end of the antisense strand). The RNAi agent also comprises a 5′-deoxy-5′-C-malonyl.

[0375] In one embodiment, B1 is 2′-OMe or 2′-F, n¹ is 8, T1 is 2′F, n² is 3, B2 is 2′-OMe, n³ is 7, n⁴ is 0, B3 is 2′-OMe, n⁵ is 3, B1′ is 2′-OMe or 2′-F, q¹ is 9, T1′ is 2′-F, q² is 1, B2′ is 2′-OMe or 2′-F, q³ is 4, q⁴ is 0, B3′ is 2′-OMe or 2′-F, q⁵ is 7, T3′ is 2′-F, q⁶ is 1, B4′ is 2′-OMe, and q⁷ is 1. The RNAi agent also comprises a 5′-P.

[0376] In one embodiment, B1 is 2′-OMe or 2′-F, n¹ is 8, T1 is 2′F, n² is 3, B2 is 2′-OMe, n³ is 7, n⁴ is 0, B3 is 2′-OMe, n⁵ is 3, B1′ is 2′-OMe or 2′-F, q¹ is 9, T1′ is 2′-F, q² is 1, B2′ is 2′-OMe or 2′-F, q³ is 4, q⁴ is 0, B3′ is 2′-OMe or 2′-F, q⁵ is 7, T3′ is 2′-F, q⁶ is 1, B4′ is 2′-OMe, and q⁷ is 1. The dsRNA agent also comprises a 5′-PS.

[0377] In one embodiment, B1 is 2′-OMe or 2′-F, n¹ is 8, T1 is 2′F, n² is 3, B2 is 2′-OMe, n³ is 7, n⁴ is 0, B3 is 2′-OMe, n⁵ is 3, B1′ is 2′-OMe or 2′-F, q¹ is 9, T1′ is 2′-F, q² is 1, B2′ is 2′-OMe or 2′-F, q³ is 4, q⁴ is 0, B3′ is 2′-OMe or 2′-F, q⁵ is 7, T3′ is 2′-F, q⁶ is 1, B4′ is 2′-OMe, and q⁷ is 1. The RNAi agent also comprises a 5′-VP. The 5′-VP may be 5′-E-VP, 5′-Z-VP, or combination thereof.

[0378] In one embodiment, B1 is 2′-OMe or 2′-F, n¹ is 8, T1 is 2′F, n² is 3, B2 is 2′-OMe, n³ is 7, n⁴ is 0, B3 is 2′-OMe, n⁵ is 3, B1′ is 2′-OMe or 2′-F, q¹ is 9, T1′ is 2′-F, q² is 1, B2′ is 2′-OMe or 2′-F, q³ is 4, q⁴ is 0, B3′ is 2′-OMe or 2′-F, q⁵ is 7, T3′ is 2′-F, q⁶ is 1, B4′ is 2′-OMe, and q⁷ is 1. The RNAi agent also comprises a 5′-PS₂.

[0379] In one embodiment, B1 is 2′-OMe or 2′-F, n¹ is 8, T1 is 2′F, n² is 3, B2 is 2′-OMe, n³ is 7, n⁴ is 0, B3 is 2′-OMe, n⁵ is 3, B1′ is 2′-OMe or 2′-F, q¹ is 9, T1′ is 2′-F, q² is 1, B2′ is 2′-OMe or 2′-F, q³ is 4, q⁴ is 0, B3′ is 2′-OMe or 2′-F, q⁵ is 7, T3′ is 2′-F, q⁶ is 1, B4′ is 2′-OMe, and q⁷ is 1. The RNAi agent also comprises a 5′-deoxy-5′-C-malonyl.

[0380] In one embodiment, B1 is 2′-OMe or 2′-F, n¹ is 8, T1 is 2′F, n² is 3, B2 is 2′-OMe, n³ is 7, n⁴ is 0, B3 is 2′-OMe, n⁵ is 3, B1′ is 2′-OMe or 2′-F, q¹ is 9, T1′ is 2′-F, q² is 1, B2′ is 2′-OMe or 2′-F, q³ is 4, q⁴ is 0, B3′ is 2′-OMe or 2′-F, q⁵ is 7, T3′ is 2′-F, q⁶ is 1, B4′ is 2′-OMe, and q⁷ is 1; with two phosphorothioate internucleotide linkage modifications within position 1-5 of the sense strand (counting from the 5′-end), and two phosphorothioate internucleotide linkage modifications at positions 1 and 2 and two phosphorothioate internucleotide linkage modifications within positions 18-23 of the antisense strand (counting from the 5′-end). The RNAi agent also comprises a 5′-P.

[0381] In one embodiment, B1 is 2′-OMe or 2′-F, n¹ is 8, T1 is 2′F, n² is 3, B2 is 2′-OMe, n³ is 7, n⁴ is 0, B3 is 2′-OMe, n⁵ is 3, B1′ is 2′-OMe or 2′-F, q¹ is 9, T1′ is 2′-F, q² is 1, B2′ is 2′-OMe or 2′-F, q³ is 4, q⁴ is 0, B3′ is 2′-OMe or 2′-F, q⁵ is 7, T3′ is 2′-F, q⁶ is 1, B4′ is 2′-OMe, and q⁷ is 1; with two phosphorothioate internucleotide linkage modifications within position 1-5 of the sense strand (counting from the 5′-end), and two phosphorothioate internucleotide linkage modifications at positions 1 and 2 and two phosphorothioate internucleotide linkage modifications within positions 18-23 of the antisense strand (counting from the 5′-end). The RNAi agent also comprises a 5′-PS.

[0382] In one embodiment, B1 is 2′-OMe or 2′-F, n¹ is 8, T1 is 2′F, n² is 3, B2 is 2′-OMe, n³ is 7, n⁴ is 0, B3 is 2′-OMe, n⁵ is 3, B1′ is 2′-OMe or 2′-F, q¹ is 9, T1′ is 2′-F, q² is 1, B2′ is 2′-OMe or 2′-F, q³ is 4, q⁴ is 0, B3′ is 2′-OMe or 2′-F, q⁵ is 7, T3′ is 2′-F, q⁶ is 1, B4′ is 2′-OMe, and q⁷ is 1; with two phosphorothioate internucleotide linkage modifications within position 1-5 of the sense strand (counting from the 5′-end), and two phosphorothioate internucleotide linkage modifications at positions 1 and 2 and two phosphorothioate internucleotide linkage modifications within positions 18-23 of the antisense strand (counting from the 5′-end). The RNAi agent also comprises a 5′-VP. The 5′-VP may be 5′-E-VP, 5′-Z-VP, or combination thereof.

[0383] In one embodiment, B1 is 2′-OMe or 2′-F, n¹ is 8, T1 is 2′F, n² is 3, B2 is 2′-OMe, n³ is 7, n⁴ is 0, B3 is 2′-OMe, n⁵ is 3, B1′ is 2′-OMe or 2′-F, q¹ is 9, T1′ is 2′-F, q² is 1, B2′ is 2′-OMe or 2′-F, q³ is 4, q⁴ is 0, B3′ is 2′-OMe or 2′-F, q⁵ is 7, T3′ is 2′-F, q⁶ is 1, B4′ is 2′-OMe, and q⁷ is 1; with two phosphorothioate internucleotide linkage modifications within position 1-5 of the sense strand (counting from the 5′-end), and two phosphorothioate internucleotide linkage modifications at positions 1 and 2 and two phosphorothioate internucleotide linkage modifications within positions 18-23 of the antisense strand (counting from the 5′-end). The RNAi agent also comprises a 5′-PS₂.

[0384] In one embodiment, B1 is 2′-OMe or 2′-F, n¹ is 8, T1 is 2′F, n² is 3, B2 is 2′-OMe, n³ is 7, n⁴ is 0, B3 is 2′-OMe, n⁵ is 3, B1′ is 2′-OMe or 2′-F, q¹ is 9, T1′ is 2′-F, q² is 1, B2′ is 2′-OMe or 2′-F, q³ is 4, q⁴ is 0, B3′ is 2′-OMe or 2′-F, q⁵ is 7, T3′ is 2′-F, q⁶ is 1, B4′ is 2′-OMe, and q⁷ is 1; with two phosphorothioate internucleotide linkage modifications within position 1-5 of the sense strand (counting from the 5′-end), and two phosphorothioate internucleotide linkage modifications at positions 1 and 2 and two phosphorothioate internucleotide linkage modifications within positions 18-23 of the antisense strand (counting from the 5′-end). The RNAi agent also comprises a 5′-deoxy-5′-C-malonyl.

[0385] In one embodiment, B1 is 2′-OMe or 2′-F, n¹ is 8, T1 is 2′F, n² is 3, B2 is 2′-OMe, n³ is 7, n⁴ is 0, B3 is 2′OMe, n⁵ is 3, B1′ is 2′-OMe or 2′-F, q¹ is 9, T1′ is 2′-F, q² is 1, B2′ is 2′-OMe or 2′-F, q³ is 4, T2′ is 2′-F, q⁴ is 2, B3′ is 2′-OMe or 2′-F, q⁵ is 5, T3′ is 2′-F, q⁶ is 1, B4′ is 2′-F, and q⁷ is 1. The RNAi agent also comprises a 5′-P.

[0386] In one embodiment, B1 is 2′-OMe or 2′-F, n¹ is 8, T1 is 2′F, n² is 3, B2 is 2′-OMe, n³ is 7, n⁴ is 0, B3 is 2′OMe, n⁵ is 3, B1′ is 2′-OMe or 2′-F, q¹ is 9, T1′ is 2′-F, q² is 1, B2′ is 2′-OMe or 2′-F, q³ is 4, T2′ is 2′-F, q⁴ is 2, B3′ is 2′-OMe or 2′-F, q⁵ is 5, T3′ is 2′-F, q⁶ is 1, B4′ is 2′-F, and q⁷ is 1. The RNAi agent also comprises a 5′-PS.

[0387] In one embodiment, B1 is 2′-OMe or 2′-F, n¹ is 8, T1 is 2′F, n² is 3, B2 is 2′-OMe, n³ is 7, n⁴ is 0, B3 is 2′OMe, n⁵ is 3, B1′ is 2′-OMe or 2′-F, q¹ is 9, T1′ is 2′-F, q² is 1, B2′ is 2′-OMe or 2′-F, q³ is 4, T2′ is 2′-F, q⁴ is 2, B3′ is 2′-OMe or 2′-F, q⁵ is 5, T3′ is 2′-F, q⁶ is 1, B4′ is 2′-F, and q⁷ is 1. The RNAi agent also comprises a 5′-VP. The 5′-VP may be 5′-E-VP, 5′-Z-VP, or combination thereof.

In one embodiment, B1 is 2′-OMe or 2′-F, n¹ is 8, T1 is 2′F, n² is 3, B2 is 2′-OMe, n³ is 7, n⁴ is 0, B3 is 2′OMe, n⁵ is 3, B1′ is 2′-OMe or 2′-F, q¹ is 9, T1′ is 2′-F, q² is 1, B2′ is 2′-OMe or 2′-F, q³ is 4, T2′ is 2′-F, q⁴ is 2, B3′ is 2′-OMe or 2′-F, q⁵ is 5, T3′ is 2′-F, q⁶ is 1, B4′ is 2′-F, and q⁷ is 1. The dsRNAi RNA agent also comprises a 5′-PS₂.

[0388] In one embodiment, B1 is 2′-OMe or 2′-F, n¹ is 8, T1 is 2′F, n² is 3, B2 is 2′-OMe, n³ is 7, n⁴ is 0, B3 is 2′OMe, n⁵ is 3, B1′ is 2′-OMe or 2′-F, q¹ is 9, T1′ is 2′-F, q² is 1, B2′ is 2′-OMe or 2′-F, q³ is 4, T2′ is 2′-F, q⁴ is 2, B3′ is 2′-OMe or 2′-F, q⁵ is 5, T3′ is 2′-F, q⁶ is 1, B4′ is 2′-F, and q⁷ is 1. The RNAi agent also comprises a 5′-deoxy-5′-C-malonyl.

[0389] In one embodiment, B1 is 2′-OMe or 2′-F, n¹ is 8, T1 is 2′F, n² is 3, B2 is 2′-OMe, n³ is 7, n⁴ is 0, B3 is 2′-OMe, n⁵ is 3, B1′ is 2′-OMe or 2′-F, q¹ is 9, T1′ is 2′-F, q² is 1, B2′ is 2′-OMe or 2′-F, q³ is 4, T2′ is 2′-F, q⁴ is 2, B3′ is 2′-OMe or 2′-F, q⁵ is 5, T3′ is 2′-F, q⁶ is 1, B4′ is 2′-F, and q⁷ is 1; with two phosphorothioate internucleotide linkage modifications within position 1-5 of the sense strand (counting from the 5′-end of the sense strand), and two phosphorothioate internucleotide linkage modifications at positions 1 and 2 and two phosphorothioate internucleotide linkage modifications within positions 18-23 of the antisense strand (counting from the 5′-end of the antisense strand). The RNAi agent also comprises a 5′-P.

[0390] In one embodiment, B1 is 2′-OMe or 2′-F, n¹ is 8, T1 is 2′F, n² is 3, B2 is 2′-OMe, n³ is 7, n⁴ is 0, B3 is 2′-OMe, n⁵ is 3, B1′ is 2′-OMe or 2′-F, q¹ is 9, T1′ is 2′-F, q² is 1, B2′ is 2′-OMe or 2′-F, q³ is 4, T2′ is 2′-F, q⁴ is 2, B3′ is 2′-OMe or 2′-F, q⁵ is 5, T3′ is 2′-F, q⁶ is 1, B4′ is 2′-F, and q⁷ is 1; with two phosphorothioate internucleotide linkage modifications within position 1-5 of the sense strand (counting from the 5′-end of the sense strand), and two phosphorothioate internucleotide linkage modifications at positions 1 and 2 and two phosphorothioate internucleotide linkage modifications within positions 18-23 of the antisense strand (counting from the 5′-end of the antisense strand). The RNAi agent also comprises a 5′-PS.

[0391] In one embodiment, B1 is 2′-OMe or 2′-F, n¹ is 8, T1 is 2′F, n² is 3, B2 is 2′-OMe, n³ is 7, n⁴ is 0, B3 is 2′-OMe, n⁵ is 3, B1′ is 2′-OMe or 2′-F, q¹ is 9, T1′ is 2′-F, q² is 1, B2′ is 2′-OMe or 2′-F, q³ is 4, T2′ is 2′-F, q⁴ is 2, B3′ is 2′-OMe or 2′-F, q⁵ is 5, T3′ is 2′-F, q⁶ is 1, B4′ is 2′-F, and q⁷ is 1; with two phosphorothioate internucleotide linkage modifications within position 1-5 of the sense strand (counting from the 5′-end of the sense strand), and two phosphorothioate internucleotide linkage modifications at positions 1 and 2 and two phosphorothioate internucleotide linkage modifications within positions 18-23 of the antisense strand (counting from the 5′-end of the antisense strand). The RNAi agent also comprises a 5′-VP. The 5′-VP may be 5′-E-VP, 5′-Z-VP, or combination thereof.

[0392] In one embodiment, B1 is 2′-OMe or 2′-F, n¹ is 8, T1 is 2′F, n² is 3, B2 is 2′-OMe, n³ is 7, n⁴ is 0, B3 is 2′-OMe, n⁵ is 3, B1′ is 2′-OMe or 2′-F, q¹ is 9, T1′ is 2′-F, q² is 1, B2′ is 2′-OMe or 2′-F, q³ is 4, T2′ is 2′-F, q⁴ is 2, B3′ is 2′-OMe or 2′-F, q⁵ is 5, T3′ is 2′-F, q⁶ is 1, B4′ is 2′-F, and q⁷ is 1; with two phosphorothioate internucleotide linkage modifications within position 1-5 of the sense strand (counting from the 5′-end of the sense strand), and two phosphorothioate internucleotide linkage modifications at positions 1 and 2 and two phosphorothioate internucleotide linkage modifications within positions 18-23 of the antisense strand (counting from the 5′-end of the antisense strand). The RNAi agent also comprises a 5′-PS₂.

[0393] In one embodiment, B1 is 2′-OMe or 2′-F, n¹ is 8, T1 is 2′F, n² is 3, B2 is 2′-OMe, n³ is 7, n⁴ is 0, B3 is 2′-OMe, n⁵ is 3, B1′ is 2′-OMe or 2′-F, q¹ is 9, T1′ is 2′-F, q² is 1, B2′ is 2′-OMe or 2′-F, q³ is 4, T2′ is 2′-F, q⁴ is 2, B3′ is 2′-OMe or 2′-F, q⁵ is 5, T3′ is 2′-F, q⁶ is 1, B4′ is 2′-F, and q⁷ is 1; with two phosphorothioate internucleotide linkage modifications within position 1-5 of the sense strand (counting from the 5′-end of the sense strand), and two phosphorothioate internucleotide linkage modifications at positions 1 and 2 and two phosphorothioate internucleotide linkage modifications within positions 18-23 of the antisense strand (counting from the 5′-end of the antisense strand). The RNAi agent also comprises a 5′-deoxy-5′-C-malonyl.

[0394] In one embodiment, B1 is 2′-OMe or 2′-F, n¹ is 8, T1 is 2′F, n² is 3, B2 is 2′-OMe, n³ is 7, n⁴ is 0, B3 is 2′-OMe, n⁵ is 3, B1′ is 2′-OMe or 2′-F, q¹ is 9, T1′ is 2′-F, q² is 1, B2′ is 2′-OMe or 2′-F, q³ is 4, q⁴ is 0, B3′ is 2′-OMe or 2′-F, q⁵ is 7, T3′ is 2′-F, q⁶ is 1, B4′ is 2′-F, and q⁷ is 1. The RNAi agent also comprises a 5′-P.

[0395] In one embodiment, B1 is 2′-OMe or 2′-F, n¹ is 8, T1 is 2′F, n² is 3, B2 is 2′-OMe, n³ is 7, n⁴ is 0, B3 is 2′-OMe, n⁵ is 3, B1′ is 2′-OMe or 2′-F, q¹ is 9, T1′ is 2′-F, q² is 1, B2′ is 2′-OMe or 2′-F, q³ is 4, q⁴ is 0, B3′ is 2′-OMe or 2′-F, q⁵ is 7, T3′ is 2′-F, q⁶ is 1, B4′ is 2′-F, and q⁷ is 1. The RNAi agent also comprises a 5′-PS.

[0396] In one embodiment, B1 is 2′-OMe or 2′-F, n¹ is 8, T1 is 2′F, n² is 3, B2 is 2′-OMe, n³ is 7, n⁴ is 0, B3 is 2′-OMe, n⁵ is 3, B1′ is 2′-OMe or 2′-F, q¹ is 9, T1′ is 2′-F, q² is 1, B2′ is 2′-OMe or 2′-F, q³ is 4, q⁴ is 0, B3′ is 2′-OMe or 2′-F, q⁵ is 7, T3′ is 2′-F, q⁶ is 1, B4′ is 2′-F, and q⁷ is 1. The RNAi agent also comprises a 5′-VP. The 5′-VP may be 5′-E-VP, 5′-Z-VP, or combination thereof.

[0397] In one embodiment, B1 is 2′-OMe or 2′-F, n¹ is 8, T1 is 2′F, n² is 3, B2 is 2′-OMe, n³ is 7, n⁴ is 0, B3 is 2′-OMe, n⁵ is 3, B1′ is 2′-OMe or 2′-F, q¹ is 9, T1′ is 2′-F, q² is 1, B2′ is 2′-OMe or 2′-F, q³ is 4, q⁴ is 0, B3′ is 2′-OMe or 2′-F, q⁵ is 7, T3′ is 2′-F, q⁶ is 1, B4′ is 2′-F, and q⁷ is 1. The RNAi agent also comprises a 5′-PS₂.

[0398] In one embodiment, B1 is 2′-OMe or 2′-F, n¹ is 8, T1 is 2′F, n² is 3, B2 is 2′-OMe, n³ is 7, n⁴ is 0, B3 is 2′-OMe, n⁵ is 3, B1′ is 2′-OMe or 2′-F, q¹ is 9, T1′ is 2′-F, q² is 1, B2′ is 2′-OMe or 2′-F, q³ is 4, q⁴ is 0, B3′ is 2′-OMe or 2′-F, q⁵ is 7, T3′ is 2′-F, q⁶ is 1, B4′ is 2′-F, and q⁷ is 1. The RNAi agent also comprises a 5′-deoxy-5′-C-malonyl.

[0399] In one embodiment, B1 is 2′-OMe or 2′-F, n¹ is 8, T1 is 2′F, n² is 3, B2 is 2′-OMe, n³ is 7, n⁴ is 0, B3 is 2′-OMe, n⁵ is 3, B1′ is 2′-OMe or 2′-F, q¹ is 9, T1′ is 2′-F, q² is 1, B2′ is 2′-OMe or 2′-F, q³ is 4, q⁴ is 0, B3′ is 2′-OMe or 2′-F, q⁵ is 7, T3′ is 2′-F, q⁶ is 1, B4′ is 2′-F, and q⁷ is 1; with two phosphorothioate internucleotide linkage modifications within position 1-5 of the sense strand (counting from the 5′-end of the sense strand), and two phosphorothioate internucleotide linkage modifications at positions 1 and 2 and two phosphorothioate internucleotide linkage modifications within positions 18-23 of the antisense strand (counting from the 5′-end of the antisense strand). The RNAi agent also comprises a 5′-P.

[0400] In one embodiment, B1 is 2′-OMe or 2′-F, n¹ is 8, T1 is 2′F, n² is 3, B2 is 2′-OMe, n³ is 7, n⁴ is 0, B3 is 2′-OMe, n⁵ is 3, B1′ is 2′-OMe or 2′-F, q¹ is 9, T1′ is 2′-F, q² is 1, B2′ is 2′-OMe or 2′-F, q³ is 4, q⁴ is 0, B3′ is 2′-OMe or 2′-F, q⁵ is 7, T3′ is 2′-F, q⁶ is 1, B4′ is 2′-F, and q⁷ is 1; with two phosphorothioate internucleotide linkage modifications within position 1-5 of the sense strand (counting from the 5′-end of the sense strand), and two phosphorothioate internucleotide linkage modifications at positions 1 and 2 and two phosphorothioate internucleotide linkage modifications within positions 18-23 of the antisense strand (counting from the 5′-end of the antisense strand). The RNAi agent also comprises a 5′-PS.

[0401] In one embodiment, B1 is 2′-OMe or 2′-F, n¹ is 8, T1 is 2′F, n² is 3, B2 is 2′-OMe, n³ is 7, n⁴ is 0, B3 is 2′-OMe, n⁵ is 3, B1′ is 2′-OMe or 2′-F, q¹ is 9, T1′ is 2′-F, q² is 1, B2′ is 2′-OMe or 2′-F, q³ is 4, q⁴ is 0, B3′ is 2′-OMe or 2′-F, q⁵ is 7, T3′ is 2′-F, q⁶ is 1, B4′ is 2′-F, and q⁷ is 1; with two phosphorothioate internucleotide linkage modifications within position 1-5 of the sense strand (counting from the 5′-end of the sense strand), and two phosphorothioate internucleotide linkage modifications at positions 1 and 2 and two phosphorothioate internucleotide linkage modifications within positions 18-23 of the antisense strand (counting from the 5′-end of the antisense strand). The RNAi agent also comprises a 5′-VP. The 5′-VP may be 5′-E-VP, 5′-Z-VP, or combination thereof.

[0402] In one embodiment, B1 is 2′-OMe or 2′-F, n¹ is 8, T1 is 2′F, n² is 3, B2 is 2′-OMe, n³ is 7, n⁴ is 0, B3 is 2′-OMe, n⁵ is 3, B1′ is 2′-OMe or 2′-F, q¹ is 9, T1′ is 2′-F, q² is 1, B2′ is 2′-OMe or 2′-F, q³ is 4, q⁴ is 0, B3′ is 2′-OMe or 2′-F, q⁵ is 7, T3′ is 2′-F, q⁶ is 1, B4′ is 2′-F, and q⁷ is 1; with two phosphorothioate internucleotide linkage modifications within position 1-5 of the sense strand (counting from the 5′-end of the sense strand), and two phosphorothioate internucleotide linkage modifications at positions 1 and 2 and two phosphorothioate internucleotide linkage modifications within positions 18-23 of the antisense strand (counting from the 5′-end of the antisense strand). The RNAi agent also comprises a 5′-PS₂.

[0403] In one embodiment, B1 is 2′-OMe or 2′-F, n¹ is 8, T1 is 2′F, n² is 3, B2 is 2′-OMe, n³ is 7, n⁴ is 0, B3 is 2′-OMe, n⁵ is 3, B1′ is 2′-OMe or 2′-F, q¹ is 9, T1′ is 2′-F, q² is 1, B2′ is 2′-OMe or 2′-F, q³ is 4, q⁴ is 0, B3′ is 2′-OMe or 2′-F, q⁵ is 7, T3′ is 2′-F, q⁶ is 1, B4′ is 2′-F, and q⁷ is 1; with two phosphorothioate internucleotide linkage modifications within position 1-5 of the sense strand (counting from the 5′-end of the sense strand), and two phosphorothioate internucleotide linkage modifications at positions 1 and 2 and two phosphorothioate internucleotide linkage modifications within positions 18-23 of the antisense strand (counting from the 5′-end of the antisense strand). The RNAi agent also comprises a 5′-deoxy-5′-C-malonyl.

[0404] In one embodiment, B1 is 2′-OMe or 2′-F, n¹ is 8, T1 is 2′F, n² is 3, B2 is 2′-OMe, n³ is 7, n⁴ is 0, B3 is 2′-OMe, n⁵ is 3, B1′ is 2′-OMe or 2′-F, q¹ is 9, T1′ is 2′-F, q² is 1, B2′ is 2′-OMe or 2′-F, q³ is 4, T2′ is 2′-F, q⁴ is 2, B3′ is 2′-OMe or 2′-F, q⁵ is 5, T3′ is 2′-F, q⁶ is 1, B4′ is 2′-OMe, and q⁷ is 1; with two phosphorothioate internucleotide linkage modifications within position 1-5 of the sense strand (counting from the 5′-end of the sense strand), and two phosphorothioate internucleotide linkage modifications at positions 1 and 2 and two phosphorothioate internucleotide linkage modifications within positions 18-23 of the antisense strand (counting from the 5′-end of the antisense strand). The RNAi agent also comprises a 5′-P and a targeting ligand. In one embodiment, the 5′-P is at the 5′-end of the antisense strand, and the targeting ligand is at the 3′-end of the sense strand.

[0405] In one embodiment, B1 is 2′-OMe or 2′-F, n¹ is 8, T1 is 2′F, n² is 3, B2 is 2′-OMe, n³ is 7, n⁴ is 0, B3 is 2′-OMe, n⁵ is 3, B1′ is 2′-OMe or 2′-F, q¹ is 9, T1′ is 2′-F, q² is 1, B2′ is 2′-OMe or 2′-F, q³ is 4, T2′ is 2′-F, q⁴ is 2, B3′ is 2′-OMe or 2′-F, q⁵ is 5, T3′ is 2′-F, q⁶ is 1, B4′ is 2′-OMe, and q⁷ is 1; with two phosphorothioate internucleotide linkage modifications within position 1-5 of the sense strand (counting from the 5′-end of the sense strand), and two phosphorothioate internucleotide linkage modifications at positions 1 and 2 and two phosphorothioate internucleotide linkage modifications within positions 18-23 of the antisense strand (counting from the 5′-end of the antisense strand). The RNAi agent also comprises a 5′-PS and a targeting ligand. In one embodiment, the 5′-PS is at the 5′-end of the antisense strand, and the targeting ligand is at the 3′-end of the sense strand.

[0406] In one embodiment, B1 is 2′-OMe or 2′-F, n¹ is 8, T1 is 2′F, n² is 3, B2 is 2′-OMe, n³ is 7, n⁴ is 0, B3 is 2′-OMe, n⁵ is 3, B1′ is 2′-OMe or 2′-F, q¹ is 9, T1′ is 2′-F, q² is 1, B2′ is 2′-OMe or 2′-F, q³ is 4, T2′ is 2′-F, q⁴ is 2, B3′ is 2′-OMe or 2′-F, q⁵ is 5, T3′ is 2′-F, q⁶ is 1, B4′ is 2′-OMe, and q⁷ is 1; with two phosphorothioate internucleotide linkage modifications within position 1-5 of the sense strand (counting from the 5′-end of the sense strand), and two phosphorothioate internucleotide linkage modifications at positions 1 and 2 and two phosphorothioate internucleotide linkage modifications within positions 18-23 of the antisense strand (counting from the 5′-end of the antisense strand). The RNAi agent also comprises a 5′-VP (e.g., a 5′-E-VP, 5′-Z-VP, or combination thereof), and a targeting ligand.

[0407] In one embodiment, the 5′-VP is at the 5′-end of the antisense strand, and the targeting ligand is at the 3′-end of the sense strand.

[0408] In one embodiment, B1 is 2′-OMe or 2′-F, n¹ is 8, T1 is 2′F, n² is 3, B2 is 2′-OMe, n³ is 7, n⁴ is 0, B3 is 2′-OMe, n⁵ is 3, B1′ is 2′-OMe or 2′-F, q¹ is 9, T1′ is 2′-F, q² is 1, B2′ is 2′-OMe or 2′-F, q³ is 4, T2′ is 2′-F, q⁴ is 2, B3′ is 2′-OMe or 2′-F, q⁵ is 5, T3′ is 2′-F, q⁶ is 1, B4′ is 2′-OMe, and q⁷ is 1; with two phosphorothioate internucleotide linkage modifications within position 1-5 of the sense strand (counting from the 5′-end of the sense strand), and two phosphorothioate internucleotide linkage modifications at positions 1 and 2 and two phosphorothioate internucleotide linkage modifications within positions 18-23 of the antisense strand (counting from the 5′-end of the antisense strand). The RNAi agent also comprises a 5′-PS₂ and a targeting ligand. In one embodiment, the 5′-PS₂ is at the 5′-end of the antisense strand, and the targeting ligand is at the 3′-end of the sense strand.

[0409] In one embodiment, B1 is 2′-OMe or 2′-F, n¹ is 8, T1 is 2′F, n² is 3, B2 is 2′-OMe, n³ is 7, n⁴ is 0, B3 is 2′-OMe, n⁵ is 3, B1′ is 2′-OMe or 2′-F, q¹ is 9, T1′ is 2′-F, q² is 1, B2′ is 2′-OMe or 2′-F, q³ is 4, T2′ is 2′-F, q⁴ is 2, B3′ is 2′-OMe or 2′-F, q⁵ is 5, T3′ is 2′-F, q⁶ is 1, B4′ is 2′-OMe, and q⁷ is 1; with two phosphorothioate internucleotide linkage modifications within position 1-5 of the sense strand (counting from the 5′-end of the sense strand), and two phosphorothioate internucleotide linkage modifications at positions 1 and 2 and two phosphorothioate internucleotide linkage modifications within positions 18-23 of the antisense strand (counting from the 5′-end of the antisense strand). The RNAi agent also comprises a 5′-deoxy-5′-C-malonyl and a targeting ligand. In one embodiment, the 5′-deoxy-5′-C-malonyl is at the 5′-end of the antisense strand, and the targeting ligand is at the 3′-end of the sense strand.

[0410] In one embodiment, B1 is 2′-OMe or 2′-F, n¹ is 8, T1 is 2′F, n² is 3, B2 is 2′-OMe, n³ is 7, n⁴ is 0, B3 is 2′-OMe, n⁵ is 3, B1′ is 2′-OMe or 2′-F, q¹ is 9, T1′ is 2′-F, q² is 1, B2′ is 2′-OMe or 2′-F, q³ is 4, q⁴ is 0, B3′ is 2′-OMe or 2′-F, q⁵ is 7, T3′ is 2′-F, q⁶ is 1, B4′ is 2′-OMe, and q⁷ is 1; with two phosphorothioate internucleotide linkage modifications within position 1-5 of the sense strand (counting from the 5′-end), and two phosphorothioate internucleotide linkage modifications at positions 1 and 2 and two phosphorothioate internucleotide linkage modifications within positions 18-23 of the antisense strand (counting from the 5′-end). The RNAi agent also comprises a 5′-P and a targeting ligand. In one embodiment, the 5′-P is at the 5′-end of the antisense strand, and the targeting ligand is at the 3′-end of the sense strand.

[0411] In one embodiment, B1 is 2′-OMe or 2′-F, n¹ is 8, T1 is 2′F, n² is 3, B2 is 2′-OMe, n³ is 7, n⁴ is 0, B3 is 2′-OMe, n⁵ is 3, B1′ is 2′-OMe or 2′-F, q¹ is 9, T1′ is 2′-F, q² is 1, B2′ is 2′-OMe or 2′-F, q³ is 4, q⁴ is 0, B3′ is 2′-OMe or 2′-F, q⁵ is 7, T3′ is 2′-F, q⁶ is 1, B4′ is 2′-OMe, and q⁷ is 1; with two phosphorothioate internucleotide linkage modifications within position 1-5 of the sense strand (counting from the 5′-end), and two phosphorothioate internucleotide linkage modifications at positions 1 and 2 and two phosphorothioate internucleotide linkage modifications within positions 18-23 of the antisense strand (counting from the 5′-end). The RNAi agent also comprises a 5′-PS and a targeting ligand. In one embodiment, the 5′-PS is at the 5′-end of the antisense strand, and the targeting ligand is at the 3′-end of the sense strand.

[0412] In one embodiment, B1 is 2′-OMe or 2′-F, n¹ is 8, T1 is 2′F, n² is 3, B2 is 2′-OMe, n³ is 7, n⁴ is 0, B3 is 2′-OMe, n⁵ is 3, B1′ is 2′-OMe or 2′-F, q¹ is 9, T1′ is 2′-F, q² is 1, B2′ is 2′-OMe or 2′-F, q³ is 4, q⁴ is 0, B3′ is 2′-OMe or 2′-F, q⁵ is 7, T3′ is 2′-F, q⁶ is 1, B4′ is 2′-OMe, and q⁷ is 1; with two phosphorothioate internucleotide linkage modifications within position 1-5 of the sense strand (counting from the 5′-end), and two phosphorothioate internucleotide linkage modifications at positions 1 and 2 and two phosphorothioate internucleotide linkage modifications within positions 18-23 of the antisense strand (counting from the 5′-end). The RNAi agent also comprises a 5′-VP (e.g., a 5′-E-VP, 5′-Z-VP, or combination thereof) and a targeting ligand. In one embodiment, the 5′-VP is at the 5′-end of the antisense strand, and the targeting ligand is at the 3′-end of the sense strand.

[0413] In one embodiment, B1 is 2′-OMe or 2′-F, n¹ is 8, T1 is 2′F, n² is 3, B2 is 2′-OMe, n³ is 7, n⁴ is 0, B3 is 2′-OMe, n⁵ is 3, B1′ is 2′-OMe or 2′-F, q¹ is 9, T1′ is 2′-F, q² is 1, B2′ is 2′-OMe or 2′-F, q³ is 4, q⁴ is 0, B3′ is 2′-OMe or 2′-F, q⁵ is 7, T3′ is 2′-F, q⁶ is 1, B4′ is 2′-OMe, and q⁷ is 1; with two phosphorothioate internucleotide linkage modifications within position 1-5 of the sense strand (counting from the 5′-end), and two phosphorothioate internucleotide linkage modifications at positions 1 and 2 and two phosphorothioate internucleotide linkage modifications within positions 18-23 of the antisense strand (counting from the 5′-end). The RNAi agent also comprises a 5′-PS₂ and a targeting ligand. In one embodiment, the 5′-PS₂ is at the 5′-end of the antisense strand, and the targeting ligand is at the 3′-end of the sense strand.

[0414] In one embodiment, B1 is 2′-OMe or 2′-F, n¹ is 8, T1 is 2′F, n² is 3, B2 is 2′-OMe, n³ is 7, n⁴ is 0, B3 is 2′-OMe, n⁵ is 3, B1′ is 2′-OMe or 2′-F, q¹ is 9, T1′ is 2′-F, q² is 1, B2′ is 2′-OMe or 2′-F, q³ is 4, q⁴ is 0, B3′ is 2′-OMe or 2′-F, q⁵ is 7, T3′ is 2′-F, q⁶ is 1, B4′ is 2′-OMe, and q⁷ is 1; with two phosphorothioate internucleotide linkage modifications within position 1-5 of the sense strand (counting from the 5′-end), and two phosphorothioate internucleotide linkage modifications at positions 1 and 2 and two phosphorothioate internucleotide linkage modifications within positions 18-23 of the antisense strand (counting from the 5′-end). The RNAi agent also comprises a 5′-deoxy-5′-C-malonyl and a targeting ligand. In one embodiment, the 5′-deoxy-5′-C-malonyl is at the 5′-end of the antisense strand, and the targeting ligand is at the 3′-end of the sense strand.

[0415] In one embodiment, B1 is 2′-OMe or 2′-F, n¹ is 8, T1 is 2′F, n² is 3, B2 is 2′-OMe, n³ is 7, n⁴ is 0, B3 is 2′-OMe, n⁵ is 3, B1′ is 2′-OMe or 2′-F, q¹ is 9, T1′ is 2′-F, q² is 1, B2′ is 2′-OMe or 2′-F, q³ is 4, T2′ is 2′-F, q⁴ is 2, B3′ is 2′-OMe or 2′-F, q⁵ is 5, T3′ is 2′-F, q⁶ is 1, B4′ is 2′-F, and q⁷ is 1; with two phosphorothioate internucleotide linkage modifications within position 1-5 of the sense strand (counting from the 5′-end of the sense strand), and two phosphorothioate internucleotide linkage modifications at positions 1 and 2 and two phosphorothioate internucleotide linkage modifications within positions 18-23 of the antisense strand (counting from the 5′-end of the antisense strand). The RNAi agent also comprises a 5′-P and a targeting ligand. In one embodiment, the 5′-P is at the 5′-end of the antisense strand, and the targeting ligand is at the 3′-end of the sense strand.

[0416] In one embodiment, B1 is 2′-OMe or 2′-F, n¹ is 8, T1 is 2′F, n² is 3, B2 is 2′-OMe, n³ is 7, n⁴ is 0, B3 is 2′-OMe, n⁵ is 3, B1′ is 2′-OMe or 2′-F, q¹ is 9, T1′ is 2′-F, q² is 1, B2′ is 2′-OMe or 2′-F, q³ is 4, T2′ is 2′-F, q⁴ is 2, B3′ is 2′-OMe or 2′-F, q⁵ is 5, T3′ is 2′-F, q⁶ is 1, B4′ is 2′-F, and q⁷ is 1; with two phosphorothioate internucleotide linkage modifications within position 1-5 of the sense strand (counting from the 5′-end of the sense strand), and two phosphorothioate internucleotide linkage modifications at positions 1 and 2 and two phosphorothioate internucleotide linkage modifications within positions 18-23 of the antisense strand (counting from the 5′-end of the antisense strand). The RNAi agent also comprises a 5′-PS and a targeting ligand. In one embodiment, the 5′-PS is at the 5′-end of the antisense strand, and the targeting ligand is at the 3′-end of the sense strand.

[0417] In one embodiment, B1 is 2′-OMe or 2′-F, n¹ is 8, T1 is 2′F, n² is 3, B2 is 2′-OMe, n³ is 7, n⁴ is 0, B3 is 2′-OMe, n⁵ is 3, B1′ is 2′-OMe or 2′-F, q¹ is 9, T1′ is 2′-F, q² is 1, B2′ is 2′-OMe or 2′-F, q³ is 4, T2′ is 2′-F, q⁴ is 2, B3′ is 2′-OMe or 2′-F, q⁵ is 5, T3′ is 2′-F, q⁶ is 1, B4′ is 2′-F, and q⁷ is 1; with two phosphorothioate internucleotide linkage modifications within position 1-5 of the sense strand (counting from the 5′-end of the sense strand), and two phosphorothioate internucleotide linkage modifications at positions 1 and 2 and two phosphorothioate internucleotide linkage modifications within positions 18-23 of the antisense strand (counting from the 5′-end of the antisense strand). The RNAi agent also comprises a 5′-VP (e.g., a 5′-E-VP, 5′-Z-VP, or combination thereof) and a targeting ligand. In one embodiment, the 5′-VP is at the 5′-end of the antisense strand, and the targeting ligand is at the 3′-end of the sense strand.

[0418] In one embodiment, B1 is 2′-OMe or 2′-F, n¹ is 8, T1 is 2′F, n² is 3, B2 is 2′-OMe, n³ is 7, n⁴ is 0, B3 is 2′-OMe, n⁵ is 3, B1′ is 2′-OMe or 2′-F, q¹ is 9, T1′ is 2′-F, q² is 1, B2′ is 2′-OMe or 2′-F, q³ is 4, T2′ is 2′-F, q⁴ is 2, B3′ is 2′-OMe or 2′-F, q⁵ is 5, T3′ is 2′-F, q⁶ is 1, B4′ is 2′-F, and q⁷ is 1; with two phosphorothioate internucleotide linkage modifications within position 1-5 of the sense strand (counting from the 5′-end of the sense strand), and two phosphorothioate internucleotide linkage modifications at positions 1 and 2 and two phosphorothioate internucleotide linkage modifications within positions 18-23 of the antisense strand (counting from the 5′-end of the antisense strand). The RNAi agent also comprises a 5′-PS₂ and a targeting ligand. In one embodiment, the 5′-PS₂ is at the 5′-end of the antisense strand, and the targeting ligand is at the 3′-end of the sense strand.

[0419] In one embodiment, B1 is 2′-OMe or 2′-F, n¹ is 8, T1 is 2′F, n² is 3, B2 is 2′-OMe, n³ is 7, n⁴ is 0, B3 is 2′-OMe, n⁵ is 3, B1′ is 2′-OMe or 2′-F, q¹ is 9, T1′ is 2′-F, q² is 1, B2′ is 2′-OMe or 2′-F, q³ is 4, T2′ is 2′-F, q⁴ is 2, B3′ is 2′-OMe or 2′-F, q⁵ is 5, T3′ is 2′-F, q⁶ is 1, B4′ is 2′-F, and q⁷ is 1; with two phosphorothioate internucleotide linkage modifications within position 1-5 of the sense strand (counting from the 5′-end of the sense strand), and two phosphorothioate internucleotide linkage modifications at positions 1 and 2 and two phosphorothioate internucleotide linkage modifications within positions 18-23 of the antisense strand (counting from the 5′-end of the antisense strand). The RNAi agent also comprises a 5′-deoxy-5′-C-malonyl and a targeting ligand. In one embodiment, the 5′-deoxy-5′-C-malonyl is at the 5′-end of the antisense strand, and the targeting ligand is at the 3′-end of the sense strand.

[0420] In one embodiment, B1 is 2′-OMe or 2′-F, n¹ is 8, T1 is 2′F, n² is 3, B2 is 2′-OMe, n³ is 7, n⁴ is 0, B3 is 2′-OMe, n⁵ is 3, B1′ is 2′-OMe or 2′-F, q¹ is 9, T1′ is 2′-F, q² is 1, B2′ is 2′-OMe or 2′-F, q³ is 4, q⁴ is 0, B3′ is 2′-OMe or 2′-F, q⁵ is 7, T3′ is 2′-F, q⁶ is 1, B4′ is 2′-F, and q⁷ is 1; with two phosphorothioate internucleotide linkage modifications within position 1-5 of the sense strand (counting from the 5′-end of the sense strand), and two phosphorothioate internucleotide linkage modifications at positions 1 and 2 and two phosphorothioate internucleotide linkage modifications within positions 18-23 of the antisense strand (counting from the 5′-end of the antisense strand). The RNAi agent also comprises a 5′-P and a targeting ligand. In one embodiment, the 5′-P is at the 5′-end of the antisense strand, and the targeting ligand is at the 3′-end of the sense strand.

[0421] In one embodiment, B1 is 2′-OMe or 2′-F, n¹ is 8, T1 is 2′F, n² is 3, B2 is 2′-OMe, n³ is 7, n⁴ is 0, B3 is 2′-OMe, n⁵ is 3, B1′ is 2′-OMe or 2′-F, q¹ is 9, T1′ is 2′-F, q² is 1, B2′ is 2′-OMe or 2′-F, q³ is 4, q⁴ is 0, B3′ is 2′-OMe or 2′-F, q⁵ is 7, T3′ is 2′-F, q⁶ is 1, B4′ is 2′-F, and q⁷ is 1; with two phosphorothioate internucleotide linkage modifications within position 1-5 of the sense strand (counting from the 5′-end of the sense strand), and two phosphorothioate internucleotide linkage modifications at positions 1 and 2 and two phosphorothioate internucleotide linkage modifications within positions 18-23 of the antisense strand (counting from the 5′-end of the antisense strand). The RNAi agent also comprises a 5′-PS and a targeting ligand. In one embodiment, the 5′-PS is at the 5′-end of the antisense strand, and the targeting ligand is at the 3′-end of the sense strand.

[0422] In one embodiment, B1 is 2′-OMe or 2′-F, n¹ is 8, T1 is 2′F, n² is 3, B2 is 2′-OMe, n³ is 7, n⁴ is 0, B3 is 2′-OMe, n⁵ is 3, B1′ is 2′-OMe or 2′-F, q¹ is 9, T1′ is 2′-F, q² is 1, B2′ is 2′-OMe or 2′-F, q³ is 4, q⁴ is 0, B3′ is 2′-OMe or 2′-F, q⁵ is 7, T3′ is 2′-F, q⁶ is 1, B4′ is 2′-F, and q⁷ is 1; with two phosphorothioate internucleotide linkage modifications within position 1-5 of the sense strand (counting from the 5′-end of the sense strand), and two phosphorothioate internucleotide linkage modifications at positions 1 and 2 and two phosphorothioate internucleotide linkage modifications within positions 18-23 of the antisense strand (counting from the 5′-end of the antisense strand). The RNAi agent also comprises a 5′-VP (e.g., a 5′-E-VP, 5′-Z-VP, or combination thereof) and a targeting ligand. In one embodiment, the 5′-VP is at the 5′-end of the antisense strand, and the targeting ligand is at the 3′-end of the sense strand.

[0423] In one embodiment, B1 is 2′-OMe or 2′-F, n¹ is 8, T1 is 2′F, n² is 3, B2 is 2′-OMe, n³ is 7, n⁴ is 0, B3 is 2′-OMe, n⁵ is 3, B1′ is 2′-OMe or 2′-F, q¹ is 9, T1′ is 2′-F, q² is 1, B2′ is 2′-OMe or 2′-F, q³ is 4, q⁴ is 0, B3′ is 2′-OMe or 2′-F, q⁵ is 7, T3′ is 2′-F, q⁶ is 1, B4′ is 2′-F, and q⁷ is 1; with two phosphorothioate internucleotide linkage modifications within position 1-5 of the sense strand (counting from the 5′-end of the sense strand), and two phosphorothioate internucleotide linkage modifications at positions 1 and 2 and two phosphorothioate internucleotide linkage modifications within positions 18-23 of the antisense strand (counting from the 5′-end of the antisense strand). The RNAi agent also comprises a 5′-PS₂ and a targeting ligand. In one embodiment, the 5′-PS₂ is at the 5′-end of the antisense strand, and the targeting ligand is at the 3′-end of the sense strand.

[0424] In one embodiment, B1 is 2′-OMe or 2′-F, n¹ is 8, T1 is 2′F, n² is 3, B2 is 2′-OMe, n³ is 7, n⁴ is 0, B3 is 2′-OMe, n⁵ is 3, B1′ is 2′-OMe or 2′-F, q¹ is 9, T1′ is 2′-F, q² is 1, B2′ is 2′-OMe or 2′-F, q³ is 4, q⁴ is 0, B3′ is 2′-OMe or 2′-F, q⁵ is 7, T3′ is 2′-F, q⁶ is 1, B4′ is 2′-F, and q⁷ is 1; with two phosphorothioate internucleotide linkage modifications within position 1-5 of the sense strand (counting from the 5′-end of the sense strand), and two phosphorothioate internucleotide linkage modifications at positions 1 and 2 and two phosphorothioate internucleotide linkage modifications within positions 18-23 of the antisense strand (counting from the 5′-end of the antisense strand). The RNAi agent also comprises a 5′-deoxy-5′-C-malonyl and a targeting ligand. In one embodiment, the 5′-deoxy-5′-C-malonyl is at the 5′-end of the antisense strand, and the targeting ligand is at the 3′-end of the sense strand.

[0425] In a particular embodiment, an RNAi agent of the present invention comprises:
[0426] (a) a sense strand having:
   [0427] (i) a length of 21 nucleotides;
   [0428] (ii) an ASGPR ligand attached to the 3′-end, wherein said ASGPR ligand comprises three GalNAc derivatives attached through a trivalent branched linker; and
   [0429] (iii) 2′-F modifications at positions 1, 3, 5, 7, 9 to 11, 13, 17, 19, and 21, and 2′-OMe modifications at positions 2, 4, 6, 8, 12, 14 to 16, 18, and 20 (counting from the 5′ end);
[0430] and
[0431] (b) an antisense strand having:
   [0432] (i) a length of 23 nucleotides;
   [0433] (ii) 2′-OMe modifications at positions 1, 3, 5, 9, 11 to 13, 15, 17, 19, 21, and 23, and 2′F modifications at positions 2, 4, 6 to 8, 10, 14, 16, 18, 20, and 22 (counting from the 5′ end); and
   [0434] (iii) phosphorothioate internucleotide linkages between nucleotide positions 21 and 22, and between nucleotide positions 22 and 23 (counting from the 5′ end);
[0435] wherein the dsRNA agents have a two nucleotide overhang at the 3′-end of the antisense strand, and a blunt end at the 5′-end of the antisense strand.

[0436] In another particular embodiment, an RNAi agent of the present invention comprises:
[0437] (a) a sense strand having:
   [0438] (i) a length of 21 nucleotides;
   [0439] (ii) an ASGPR ligand attached to the 3′-end, wherein said ASGPR ligand comprises three GalNAc derivatives attached through a trivalent branched linker;
   [0440] (iii) 2′-F modifications at positions 1, 3, 5, 7, 9 to 11, 13, 15, 17, 19, and 21, and 2′-OMe modifications at positions 2, 4, 6, 8, 12, 14, 16, 18, and 20 (counting from the 5′ end); and
   [0441] (iv) phosphorothioate internucleotide linkages between nucleotide positions 1 and 2, and between nucleotide positions 2 and 3 (counting from the 5′ end);
[0442] and
[0443] (b) an antisense strand having:
   [0444] (i) a length of 23 nucleotides;
   [0445] (ii) 2′-OMe modifications at positions 1, 3, 5, 7, 9, 11 to 13, 15, 17, 19, and 21 to 23, and 2′F modifications at positions 2, 4, 6, 8, 10, 14, 16, 18, and 20 (counting from the 5′ end); and
   [0446] (iii) phosphorothioate internucleotide linkages between nucleotide positions 1 and 2, between nucleotide positions 2 and 3, between nucleotide positions 21 and 22, and between nucleotide positions 22 and 23 (counting from the 5′ end);
      wherein the RNAi agents have a two nucleotide overhang at the 3′-end of the antisense strand, and a blunt end at the 5′-end of the antisense strand.

[0447] In another particular embodiment, a RNAi agent of the present invention comprises:
[0448] (a) a sense strand having:
   [0449] (i) a length of 21 nucleotides;
   [0450] (ii) an ASGPR ligand attached to the 3′-end, wherein said ASGPR ligand comprises three GalNAc derivatives attached through a trivalent branched linker;
   [0451] (iii) 2′-OMe modifications at positions 1 to 6, 8, 10, and 12 to 21, 2′-F modifications at positions 7, and 9, and a deoxy-nucleotide (e.g. dT) at position 11 (counting from the 5′ end); and
   [0452] (iv) phosphorothioate internucleotide linkages between nucleotide positions 1 and 2, and between nucleotide positions 2 and 3 (counting from the 5′ end);
[0453] and
[0454] (b) an antisense strand having:
   [0455] (i) a length of 23 nucleotides;
   [0456] (ii) 2′-OMe modifications at positions 1, 3, 7, 9, 11, 13, 15, 17, and 19 to 23, and 2′-F modifications at positions 2, 4 to 6, 8, 10, 12, 14, 16, and 18 (counting from the 5′ end); and
   [0457] (iii) phosphorothioate internucleotide linkages between nucleotide positions 1 and 2, between nucleotide positions 2 and 3, between nucleotide positions 21 and 22, and between nucleotide positions 22 and 23 (counting from the 5′ end);
      wherein the RNAi agents have a two nucleotide overhang at the 3′-end of the antisense strand, and a blunt end at the 5′-end of the antisense strand.

[0458] In another particular embodiment, a RNAi agent of the present invention comprises:
[0459] (a) a sense strand having:
   [0460] (i) a length of 21 nucleotides;
   [0461] (ii) an ASGPR ligand attached to the 3′-end, wherein said ASGPR ligand comprises three GalNAc derivatives attached through a trivalent branched linker;
   [0462] (iii) 2′-OMe modifications at positions 1 to 6, 8, 10, 12, 14, and 16 to 21, and 2′-F modifications at positions 7, 9, 11, 13, and 15; and
   [0463] (iv) phosphorothioate internucleotide linkages between nucleotide positions 1 and 2, and between nucleotide positions 2 and 3 (counting from the 5′ end);
[0464] and
[0465] (b) an antisense strand having:
   [0466] (i) a length of 23 nucleotides;
   [0467] (ii) 2′-OMe modifications at positions 1, 5, 7, 9, 11, 13, 15, 17, 19, and 21 to 23, and 2′-F modifications at positions 2 to 4, 6, 8, 10, 12, 14, 16, 18, and 20 (counting from the 5′ end); and
   [0468] (iii) phosphorothioate internucleotide linkages between nucleotide positions 1 and 2, between nucleotide positions 2 and 3, between nucleotide positions 21 and 22, and between nucleotide positions 22 and 23 (counting from the 5′ end);
      wherein the RNAi agents have a two nucleotide overhang at the 3′-end of the antisense strand, and a blunt end at the 5′-end of the antisense strand.

[0469] In another particular embodiment, a RNAi agent of the present invention comprises:
[0470] (a) a sense strand having:
   [0471] (i) a length of 21 nucleotides;
   [0472] (ii) an ASGPR ligand attached to the 3′-end, wherein said ASGPR ligand comprises three GalNAc derivatives attached through a trivalent branched linker;
   [0473] (iii) 2′-OMe modifications at positions 1 to 9, and 12 to 21, and 2′-F modifications at positions 10, and 11; and
   [0474] (iv) phosphorothioate internucleotide linkages between nucleotide positions 1 and 2, and between nucleotide positions 2 and 3 (counting from the 5′ end);
[0475] and
[0476] (b) an antisense strand having:
   [0477] (i) a length of 23 nucleotides;
   [0478] (ii) 2′-OMe modifications at positions 1, 3, 5, 7, 9, 11 to 13, 15, 17, 19, and 21 to 23, and 2′-F modifications at positions 2, 4, 6, 8, 10, 14, 16, 18, and 20 (counting from the 5′ end); and
   [0479] (iii) phosphorothioate internucleotide linkages between nucleotide positions 1 and 2, between nucleotide positions 2 and 3, between nucleotide positions 21 and 22, and between nucleotide positions 22 and 23 (counting from the 5′ end);
      wherein the RNAi agents have a two nucleotide overhang at the 3′-end of the antisense strand, and a blunt end at the 5′-end of the antisense strand.

[0480] In another particular embodiment, a RNAi agent of the present invention comprises:
[0481] (a) a sense strand having:
   [0482] (i) a length of 21 nucleotides;
   [0483] (ii) an ASGPR ligand attached to the 3′-end, wherein said ASGPR ligand comprises three GalNAc derivatives attached through a trivalent branched linker;
   [0484] (iii) 2′-F modifications at positions 1, 3, 5, 7, 9 to 11, and 13, and 2′-OMe modifications at positions 2, 4, 6, 8, 12, and 14 to 21; and
   [0485] (iv) phosphorothioate internucleotide linkages between nucleotide positions 1 and 2, and between nucleotide positions 2 and 3 (counting from the 5′ end);
[0486] and
[0487] (b) an antisense strand having:
   [0488] (i) a length of 23 nucleotides;
   [0489] (ii) 2′-OMe modifications at positions 1, 3, 5 to 7, 9, 11 to 13, 15, 17 to 19, and 21 to 23, and 2′-F modifications at positions 2, 4, 8, 10, 14, 16, and 20 (counting from the 5′ end); and
   [0490] (iii) phosphorothioate internucleotide linkages between nucleotide positions 1 and 2, between nucleotide positions 2 and 3, between nucleotide positions 21 and 22, and between nucleotide positions 22 and 23 (counting from the 5′ end);
      wherein the RNAi agents have a two nucleotide overhang at the 3′-end of the antisense strand, and a blunt end at the 5′-end of the antisense strand.

[0491] In another particular embodiment, a RNAi agent of the present invention comprises:
[0492] (a) a sense strand having:
   [0493] (i) a length of 21 nucleotides;
   [0494] (ii) an ASGPR ligand attached to the 3′-end, wherein said ASGPR ligand comprises three GalNAc derivatives attached through a trivalent branched linker;
   [0495] (iii) 2′-OMe modifications at positions 1, 2, 4, 6, 8, 12, 14, 15, 17, and 19 to 21, and 2′-F modifications at positions 3, 5, 7, 9 to 11, 13, 16, and 18; and
   [0496] (iv) phosphorothioate internucleotide linkages between nucleotide positions 1 and 2, and between nucleotide positions 2 and 3 (counting from the 5′ end);
[0497] and
[0498] (b) an antisense strand having:
   [0499] (i) a length of 25 nucleotides;
   [0500] (ii) 2′-OMe modifications at positions 1, 4, 6, 7, 9, 11 to 13, 15, 17, and 19 to 23, 2′-F modifications at positions 2, 3, 5, 8, 10, 14, 16, and 18, and deoxy-nucleotides (e.g. dT) at positions 24 and 25 (counting from the 5′ end); and
   [0501] (iii) phosphorothioate internucleotide linkages between nucleotide positions 1 and 2, between nucleotide positions 2 and 3, between nucleotide positions 21 and 22, and between nucleotide positions 22 and 23 (counting from the 5′ end);
      wherein the RNAi agents have a four nucleotide overhang at the 3′-end of the antisense strand, and a blunt end at the 5′-end of the antisense strand.

[0502] In another particular embodiment, a RNAi agent of the present invention comprises:
[0503] (a) a sense strand having:
   [0504] (i) a length of 21 nucleotides;
   [0505] (ii) an ASGPR ligand attached to the 3′-end, wherein said ASGPR ligand comprises three GalNAc derivatives attached through a trivalent branched linker;
   [0506] (iii) 2′-OMe modifications at positions 1 to 6, 8, and 12 to 21, and 2′-F modifications at positions 7, and 9 to 11; and
   [0507] (iv) phosphorothioate internucleotide linkages between nucleotide positions 1 and 2, and between nucleotide positions 2 and 3 (counting from the 5′ end);
[0508] and
[0509] (b) an antisense strand having:
   [0510] (i) a length of 23 nucleotides;
   [0511] (ii) 2′-OMe modifications at positions 1, 3 to 5, 7, 8, 10 to 13, 15, and 17 to 23, and 2′-F modifications at positions 2, 6, 9, 14, and 16 (counting from the 5′ end); and
   [0512] (iii) phosphorothioate internucleotide linkages between nucleotide positions 1 and 2, between nucleotide positions 2 and 3, between nucleotide positions 21 and 22, and between nucleotide positions 22 and 23 (counting from the 5′ end);
      wherein the RNAi agents have a two nucleotide overhang at the 3′-end of the antisense strand, and a blunt end at the 5′-end of the antisense strand.

[0513] In another particular embodiment, a RNAi agent of the present invention comprises:
[0514] (a) a sense strand having:
   [0515] (i) a length of 21 nucleotides;
   [0516] (ii) an ASGPR ligand attached to the 3′-end, wherein said ASGPR ligand comprises three GalNAc derivatives attached through a trivalent branched linker;
   [0517] (iii) 2′-OMe modifications at positions 1 to 6, 8, and 12 to 21, and 2′-F modifications at positions 7, and 9 to 11; and
   [0518] (iv) phosphorothioate internucleotide linkages between nucleotide positions 1 and 2, and between nucleotide positions 2 and 3 (counting from the 5′ end);
[0519] and
[0520] (b) an antisense strand having:
   [0521] (i) a length of 23 nucleotides;
   [0522] (ii) 2′-OMe modifications at positions 1, 3 to 5, 7, 10 to 13, 15, and 17 to 23, and 2′-F modifications at positions 2, 6, 8, 9, 14, and 16 (counting from the 5′ end); and
   [0523] (iii) phosphorothioate internucleotide linkages between nucleotide positions 1 and 2, between nucleotide positions 2 and 3, between nucleotide positions 21 and 22, and between nucleotide positions 22 and 23 (counting from the 5′ end);
      wherein the RNAi agents have a two nucleotide overhang at the 3′-end of the antisense strand, and a blunt end at the 5′-end of the antisense strand.

[0524] In another particular embodiment, a RNAi agent of the present invention comprises:
[0525] (a) a sense strand having:
   [0526] (i) a length of 19 nucleotides;
   [0527] (ii) an ASGPR ligand attached to the 3′-end, wherein said ASGPR ligand comprises three GalNAc derivatives attached through a trivalent branched linker;
   [0528] (iii) 2′-OMe modifications at positions 1 to 4, 6, and 10 to 19, and 2′-F modifications at positions 5, and 7 to 9; and
   [0529] (iv) phosphorothioate internucleotide linkages between nucleotide positions 1 and 2, and between nucleotide positions 2 and 3 (counting from the 5′ end);
[0530] and
[0531] (b) an antisense strand having:
   [0532] (i) a length of 21 nucleotides;
   [0533] (ii) 2′-OMe modifications at positions 1, 3 to 5, 7, 10 to 13, 15, and 17 to 21, and 2′-F modifications at positions 2, 6, 8, 9, 14, and 16 (counting from the 5′ end); and
   [0534] (iii) phosphorothioate internucleotide linkages between nucleotide positions 1 and 2, between nucleotide positions 2 and 3, between nucleotide positions 19 and 20, and between nucleotide positions 20 and 21 (counting from the 5′ end);
      wherein the RNAi agents have a two nucleotide overhang at the 3′-end of the antisense strand, and a blunt end at the 5′-end of the antisense strand.

[0535] In certain embodiments, the iRNA for use in the methods of the invention is an agent selected from agents listed in any one of Tables 2-3. These agents may further comprise a ligand.

### III. iRNAs Conjugated to Ligands

[0536] Another modification of the RNA of an iRNA of the invention involves chemically linking to the iRNA one or more ligands, moieties or conjugates that enhance the activity, cellular distribution, or cellular uptake of the iRNA e.g., into a cell. Such moieties include but are not limited to lipid moieties such as a cholesterol moiety (Letsinger et al., Proc. Natl. Acid. Sci. USA, 1989, 86: 6553-6556). In other embodiments, the ligand is cholic acid (Manoharan et al., Biorg. Med. Chem. Let., 1994, 4:1053-1060), a thioether, e.g., beryl-S-tritylthiol (Manoharan et al., Ann. N.Y. Acad. Sci., 1992, 660:306-309; Manoharan et al., Biorg. Med. Chem. Let., 1993, 3:2765-2770), a thiocholesterol (Oberhauser et al., Nucl. Acids Res., 1992, 20:533-538), an aliphatic chain, e.g., dodecandiol or undecyl residues (Saison-Behmoaras et al., EMBO J, 1991, 10:1111-1118; Kabanov et al., FEBS Lett., 1990, 259:327-330; Svinarchuk et al., Biochimie, 1993, 75:49-54), a phospholipid, e.g., di-hexadecyl-rac-glycerol or triethyl-ammonium 1,2-di-O-hexadecyl-rac-glycero-3-phosphonate (Manoharan et al., Tetrahedron Lett., 1995, 36:3651-3654; Shea et al., Nucl. Acids Res., 1990, 18:3777-3783), a polyamine or a polyethylene glycol chain (Manoharan et al., Nucleosides & Nucleotides, 1995, 14:969-973), or adamantane acetic acid (Manoharan et al., Tetrahedron Lett., 1995, 36:3651-3654), a palmityl moiety (Mishra et al., Biochim. Biophys. Acta, 1995, 1264:229-237), or an octadecylamine or hexylamino-carbonyloxycholesterol moiety (Crooke et al., J. Pharmacol. Exp. Ther., 1996, 277:923-937).

[0537] In certain embodiments, a ligand alters the distribution, targeting, or lifetime of an iRNA agent into which it is incorporated. In some embodiments a ligand provides an enhanced affinity for a selected target, e.g., molecule, cell or cell type, compartment, e.g., a cellular or organ compartment, tissue, organ or region of the body, as, e.g., compared to a species absent such a ligand. In some embodiments, ligands do not take part in duplex pairing in a duplexed nucleic acid.

[0538] Ligands can include a naturally occurring substance, such as a protein (e.g., human serum albumin (HSA), low-density lipoprotein (LDL), or globulin); carbohydrate (e.g., a dextran, pullulan, chitin, chitosan, inulin, cyclodextrin, N-acetylglucosamine, N-acetylgalactosamine, or hyaluronic acid); or a lipid. The ligand can also be a recombinant or synthetic molecule, such as a synthetic polymer, e.g., a synthetic polyamino acid. Examples of polyamino acids include polyamino acid is a polylysine (PLL), poly L-aspartic acid, poly L-glutamic acid, styrene-maleic acid anhydride copolymer, poly(L-lactide-co-glycolied) copolymer, divinyl ether-maleic anhydride copolymer, N-(2-hydroxypropyl)methacrylamide copolymer (HMPA), polyethylene glycol (PEG), polyvinyl alcohol (PVA), polyurethane, poly(2-ethylacryllic acid), N-isopropylacrylamide polymers, or polyphosphazine. Example of polyamines include: polyethylenimine, polylysine (PLL), spermine, spermidine, polyamine, pseudopeptide-polyamine, peptidomimetic polyamine, dendrimer polyamine, arginine, amidine, protamine, cationic lipid, cationic porphyrin, quaternary salt of a polyamine, or an alpha helical peptide.

[0539] Ligands can also include targeting groups, e.g., a cell or tissue targeting agent, e.g., a lectin, glycoprotein, lipid or protein, e.g., an antibody, that binds to a specified cell type such as a kidney cell. A targeting group can be a thyrotropin, melanotropin, lectin, glycoprotein, surfactant protein A, Mucin carbohydrate, multivalent lactose, multivalent galactose, N-acetyl-galactosamine, N-acetyl-glucosamine multivalent mannose, multivalent fucose, glycosylated polyaminoacids, multivalent galactose, transferrin, bisphosphonate, polyglutamate, polyaspartate, a lipid, cholesterol, a steroid, bile acid, folate, vitamin B12, vitamin A, biotin, or an RGD peptide or RGD peptide mimetic. In certain embodiments, the ligand is a multivalent galactose, e.g., an N-acetyl-galactosamine.

[0540] Other examples of ligands include dyes, intercalating agents (e.g. acridines), cross-linkers (e.g. psoralene, mitomycin C), porphyrins (TPPC4, texaphyrin, Sapphyrin), polycyclic aromatic hydrocarbons (e.g., phenazine, dihydrophenazine), artificial endonucleases (e.g. EDTA), lipophilic molecules, e.g., cholesterol, cholic acid, adamantane acetic acid, 1-pyrene butyric acid, dihydrotestosterone, 1,3-Bis-O(hexadecyl)glycerol, geranyloxyhexyl group, hexadecylglycerol, borneol, menthol, 1,3-propanediol, heptadecyl group, palmitic acid, myristic acid, O3-(oleoyl)lithocholic acid, O3-(oleoyl)cholenic acid, dimethoxytrityl, or phenoxazine) and peptide conjugates (e.g., antennapedia peptide, Tat peptide), alkylating agents, phosphate, amino, mercapto, PEG (e.g., PEG-40K), MPEG, [MPEG]₂, polyamino, alkyl, substituted alkyl, radiolabeled markers, enzymes, haptens (e.g. biotin), transport/absorption facilitators (e.g., aspirin, vitamin E, folic acid), synthetic ribonucleases (e.g., imidazole, bisimidazole, histamine, imidazole clusters, acridine-imidazole conjugates, Eu3+ complexes of tetraazamacrocycles), dinitrophenyl, HRP, or AP.

[0541] Ligands can be proteins, e.g., glycoproteins, or peptides, e.g., molecules having a specific affinity for a co-ligand, or antibodies e.g., an antibody, that binds to a specified cell type such as a hepatic cell. Ligands can also include hormones and hormone receptors. They can also include non-peptidic species, such as lipids, lectins, carbohydrates, vitamins, cofactors, multivalent lactose, multivalent galactose, N-acetyl-galactosamine, N-acetyl-glucosamine multivalent mannose, or multivalent fucose. The ligand can be, for example, a lipopolysaccharide, an activator of p38 MAP kinase, or an activator of NF-κB.

[0542] The ligand can be a substance, e.g., a drug, which can increase the uptake of the iRNA agent into the cell, for example, by disrupting the cell's cytoskeleton, e.g., by disrupting the cell's microtubules, microfilaments, or intermediate filaments. The drug can be, for example, taxol, vincristine, vinblastine, cytochalasin, nocodazole, japlakinolide, latrunculin A, phalloidin, swinholide A, indanocine, or myoservin.

[0543] In some embodiments, a ligand attached to an iRNA as described herein acts as a pharmacokinetic modulator (PK modulator). PK modulators include lipophiles, bile acids, steroids, phospholipid analogues, peptides, protein binding agents, PEG, vitamins, etc. Exemplary PK modulators include, but are not limited to, cholesterol, fatty acids, cholic acid, lithocholic acid, dialkylglycerides, diacylglyceride, phospholipids, sphingolipids, naproxen, ibuprofen, vitamin E, biotin. Oligonucleotides that comprise a number of phosphorothioate linkages are also known to bind to serum protein, thus short oligonucleotides, e.g., oligonucleotides of about 5 bases, 10 bases, 15 bases, or 20 bases, comprising multiple of phosphorothioate linkages in the backbone are also amenable to the present invention as ligands (e.g. as PK modulating ligands). In addition, aptamers that bind serum components (e.g. serum proteins) are also suitable for use as PK modulating ligands in the embodiments described herein.

[0544] Ligand-conjugated iRNAs of the invention may be synthesized by the use of an oligonucleotide that bears a pendant reactive functionality, such as that derived from the attachment of a linking molecule onto the oligonucleotide (described below). This reactive oligonucleotide may be reacted directly with commercially-available ligands, ligands that are synthesized bearing any of a variety of protecting groups, or ligands that have a linking moiety attached thereto.

[0545] The oligonucleotides used in the conjugates of the present invention may be conveniently and routinely made through the well-known technique of solid-phase synthesis. Equipment for such synthesis is sold by several vendors including, for example, Applied Biosystems® (Foster City, Calif.). Any other methods for such synthesis known in the art may additionally or alternatively be employed. It is also known to use similar techniques to prepare other oligonucleotides, such as the phosphorothioates and alkylated derivatives.

[0546] In the ligand-conjugated iRNAs and ligand-molecule bearing sequence-specific linked nucleosides of the present invention, the oligonucleotides and oligonucleosides may be assembled on a suitable DNA synthesizer utilizing standard nucleotide or nucleoside precursors, or nucleotide or nucleoside conjugate precursors that already bear the linking moiety, ligand-nucleotide or nucleoside-conjugate precursors that already bear the ligand molecule, or non-nucleoside ligand-bearing building blocks.

[0547] When using nucleotide-conjugate precursors that already bear a linking moiety, the synthesis of the sequence-specific linked nucleosides is typically completed, and the ligand molecule is then reacted with the linking moiety to form the ligand-conjugated oligonucleotide. In some embodiments, the oligonucleotides or linked nucleosides of the present invention are synthesized by an automated synthesizer using phosphoramidites derived from ligand-nucleoside conjugates in addition to the standard phosphoramidites and non-standard phosphoramidites that are commercially available and routinely used in oligonucleotide synthesis.

### A. Lipid Conjugates

[0548] In certain embodiments, the ligand or conjugate is a lipid or lipid-based molecule. In one embodiment, such a lipid or lipid-based molecule binds a serum protein, e.g., human serum albumin (HSA). An HSA binding ligand allows for distribution of the conjugate to a target tissue, e.g., a non-kidney target tissue of the body. For example, the target tissue can be the liver, including parenchymal cells of the liver. Other molecules that can bind HSA can also be used as ligands. For example, naproxen or aspirin can be used. A lipid or lipid-based ligand can (a) increase resistance to degradation of the conjugate, (b) increase targeting or transport into a target cell or cell membrane, or (c) can be used to adjust binding to a serum protein, e.g., HSA.

[0549] A lipid based ligand can be used to inhibit, e.g., control the binding of the conjugate to a target tissue. For example, a lipid or lipid-based ligand that binds to HSA more strongly will be less likely to be targeted to the kidney and therefore less likely to be cleared from the body. A lipid or lipid-based ligand that binds to HSA less strongly can be used to target the conjugate to the kidney.

[0550] In certain embodiments, the lipid based ligand binds HSA. In one embodiment, it binds HSA with a sufficient affinity such that the conjugate will be distributed to a non-kidney tissue. However, it is preferred that the affinity not be so strong that the HSA-ligand binding cannot be reversed.

[0551] In other embodiments, the lipid based ligand binds HSA weakly or not at all. In one embodiment, the conjugate will be distributed to the kidney. Other moieties that target to kidney cells can also be used in place of, or in addition to, the lipid based ligand.

[0552] In another aspect, the ligand is a moiety, e.g., a vitamin, which is taken up by a target cell, e.g., a proliferating cell. These are particularly useful for treating disorders characterized by unwanted cell proliferation, e.g., of the malignant or non-malignant type, e.g., cancer cells. Exemplary vitamins include vitamin A, E, and K. Other exemplary vitamins include are B vitamin, e.g., folic acid, B12, riboflavin, biotin, pyridoxal or other vitamins or nutrients taken up by target cells such as liver cells. Also included are HSA and low density lipoprotein (LDL).

### B. Cell Permeation Agents

[0553] In another aspect, the ligand is a cell-permeation agent, such as, a helical cell-permeation agent. In one embodiment, the agent is amphipathic. An exemplary agent is a peptide such as tat or antennopedia. If the agent is a peptide, it can be modified, including a peptidylmimetic, invertomers, non-peptide or pseudo-peptide linkages, and use of D-amino acids. In one embodiment, the helical agent is an alpha-helical agent, which has a lipophilic and a lipophobic phase.

[0554] The ligand can be a peptide or peptidomimetic. A peptidomimetic (also referred to herein as an oligopeptidomimetic) is a molecule capable of folding into a defined three-dimensional structure similar to a natural peptide. The attachment of peptide and peptidomimetics to iRNA agents can affect pharmacokinetic distribution of the iRNA, such as by enhancing cellular recognition and absorption. The peptide or peptidomimetic moiety can be about 5-50 amino acids long, e.g., about 5, 10, 15, 20, 25, 30, 35, 40, 45, or 50 amino acids long.

[0555] A peptide or peptidomimetic can be, for example, a cell permeation peptide, cationic peptide, amphipathic peptide, or hydrophobic peptide (e.g., consisting primarily of Tyr, Trp, or Phe). The peptide moiety can be a dendrimer peptide, constrained peptide or crosslinked peptide. In another alternative, the peptide moiety can include a hydrophobic membrane translocation sequence (MTS). An exemplary hydrophobic MTS-containing peptide is RFGF having the amino acid sequence AAVALLPAVLLALLAP (SEQ ID NO: 14). An RFGF analogue (e.g., amino acid sequence AALLPVLLAAP (SEQ ID NO:15) containing a hydrophobic MTS can also be a targeting moiety. The peptide moiety can be a “delivery” peptide, which can carry large polar molecules including peptides, oligonucleotides, and protein across cell membranes. For example, sequences from the HIV Tat protein (GRKKRRQRRRPPQ (SEQ ID NO:16) and the Drosophila Antennapedia protein (RQIKIWFQNRRMKWKK (SEQ ID NO:17) have been found to be capable of functioning as delivery peptides. A peptide or peptidomimetic can be encoded by a random sequence of DNA, such as a peptide identified from a phage-display library, or one-bead-one-compound (OBOC) combinatorial library (Lam et al., Nature, 354:82-84, 1991). Examples of a peptide or peptidomimetic tethered to a dsRNA agent via an incorporated monomer unit for cell targeting purposes is an arginine-glycine-aspartic acid (RGD)-peptide, or RGD mimic. A peptide moiety can range in length from about 5 amino acids to about 40 amino acids. The peptide moieties can have a structural modification, such as to increase stability or direct conformational properties. Any of the structural modifications described below can be utilized.

[0556] An RGD peptide for use in the compositions and methods of the invention may be linear or cyclic, and may be modified, e.g., glycosylated or methylated, to facilitate targeting to a specific tissue(s). RGD-containing peptides and peptidiomimemtics may include D-amino acids, as well as synthetic RGD mimics. In addition to RGD, one can use other moieties that target the integrin ligand, e.g., PECAM-1 or VEGF.

[0557] A “cell permeation peptide” is capable of permeating a cell, e.g., a microbial cell, such as a bacterial or fungal cell, or a mammalian cell, such as a human cell. A microbial cell-permeating peptide can be, for example, an α-helical linear peptide (e.g., LL-37 or Ceropin P1), a disulfide bond-containing peptide (e.g., α-defensin, β-defensin or bactenecin), or a peptide containing only one or two dominating amino acids (e.g., PR-39 or indolicidin). A cell permeation peptide can also include a nuclear localization signal (NLS). For example, a cell permeation peptide can be a bipartite amphipathic peptide, such as MPG, which is derived from the fusion peptide domain of HIV-1 gp41 and the NLS of SV40 large T antigen (Simeoni et al., Nucl. Acids Res. 31:2717-2724, 2003).

### C. Carbohydrate Conjugates

[0558] In some embodiments of the compositions and methods of the invention, an iRNA further comprises a carbohydrate. The carbohydrate conjugated iRNA is advantageous for the in vivo delivery of nucleic acids, as well as compositions suitable for in vivo therapeutic use, as described herein. As used herein, “carbohydrate” refers to a compound which is either a carbohydrate per se made up of one or more monosaccharide units having at least 6 carbon atoms (which can be linear, branched or cyclic) with an oxygen, nitrogen or sulfur atom bonded to each carbon atom; or a compound having as a part thereof a carbohydrate moiety made up of one or more monosaccharide units each having at least six carbon atoms (which can be linear, branched or cyclic), with an oxygen, nitrogen or sulfur atom bonded to each carbon atom. Representative carbohydrates include the sugars (mono-, di-, tri-, and oligosaccharides containing from about 4, 5, 6, 7, 8, or 9 monosaccharide units), and polysaccharides such as starches, glycogen, cellulose and polysaccharide gums. Specific monosaccharides include C5 and above (e.g., C5, C6, C7, or C8) sugars; di- and trisaccharides include sugars having two or three monosaccharide units (e.g., C5, C6, C7, or C8).

[0559] In certain embodiments, a carbohydrate conjugate for use in the compositions and methods of the invention is a monosaccharide.

[0560] In certain embodiments, the monosaccharide is an N-acetylgalactosamine (GalNAc). GalNAc conjugates, which comprise one or more N-acetylgalactosamine (GalNAc) derivatives, are described, for example, in U.S. Pat. No. 8,106,022, the entire content of which is hereby incorporated herein by reference. In some embodiments, the GalNAc conjugate serves as a ligand that targets the iRNA to particular cells. In some embodiments, the GalNAc conjugate targets the iRNA to liver cells, e.g., by serving as a ligand for the asialoglycoprotein receptor of liver cells (e.g., hepatocytes).

[0561] In some embodiments, the carbohydrate conjugate comprises one or more GalNAc derivatives. The GalNAc derivatives may be attached via a linker, e.g., a bivalent or trivalent branched linker. In some embodiments the GalNAc conjugate is conjugated to the 3′ end of the sense strand. In some embodiments, the GalNAc conjugate is conjugated to the iRNA agent (e.g., to the 3′ end of the sense strand) via a linker, e.g., a linker as described herein. In some embodiments the GalNAc conjugate is conjugated to the 5′ end of the sense strand. In some embodiments, the GalNAc conjugate is conjugated to the iRNA agent (e.g., to the 5′ end of the sense strand) via a linker, e.g., a linker as described herein.

[0562] In certain embodiments of the invention, the GalNAc or GalNAc derivative is attached to an iRNA agent of the invention via a monovalent linker. In some embodiments, the GalNAc or GalNAc derivative is attached to an iRNA agent of the invention via a bivalent linker. In yet other embodiments of the invention, the GalNAc or GalNAc derivative is attached to an iRNA agent of the invention via a trivalent linker. In other embodiments of the invention, the GalNAc or GalNAc derivative is attached to an iRNA agent of the invention via a tetravalent linker.

[0563] In certain embodiments, the double stranded RNAi agents of the invention comprise one GalNAc or GalNAc derivative attached to the iRNA agent. In certain embodiments, the double stranded RNAi agents of the invention comprise a plurality (e.g., 2, 3, 4, 5, or 6) GalNAc or GalNAc derivatives, each independently attached to a plurality of nucleotides of the double stranded RNAi agent through a plurality of monovalent linkers.

[0564] In some embodiments, for example, when the two strands of an iRNA agent of the invention are part of one larger molecule connected by an uninterrupted chain of nucleotides between the 3′-end of one strand and the 5′-end of the respective other strand forming a hairpin loop comprising, a plurality of unpaired nucleotides, each unpaired nucleotide within the hairpin loop may independently comprise a GalNAc or GalNAc derivative attached via a monovalent linker. The hairpin loop may also be formed by an extended overhang in one strand of the duplex.

[0565] In some embodiments, for example, when the two strands of an iRNA agent of the invention are part of one larger molecule connected by an uninterrupted chain of nucleotides between the 3′-end of one strand and the 5′-end of the respective other strand forming a hairpin loop comprising, a plurality of unpaired nucleotides, each unpaired nucleotide within the hairpin loop may independently comprise a GalNAc or GalNAc derivative attached via a monovalent linker. The hairpin loop may also be formed by an extended overhang in one strand of the duplex.

[0566] In one embodiment, a carbohydrate conjugate for use in the compositions and methods of the invention is selected from the group consisting of:

[chemical structure]

[chemical structure]

[chemical structure]

[chemical structure]

[chemical structure]

wherein Y is O or S and n is 3-6 (Formula XXIV);

[chemical structure]

wherein Y is O or S and n is 3-6 (Formula XXV);

[chemical structure]

wherein X is O or S (Formula XXVII);

[chemical structure]

[chemical structure]

[chemical structure]

[0567] In another embodiment, a carbohydrate conjugate for use in the compositions and methods of the invention is a monosaccharide. In one embodiment, the monosaccharide is an N-acetylgalactosamine, such as

[chemical structure]

[0568] In some embodiments, the RNAi agent is attached to the carbohydrate conjugate via a linker as shown in the following schematic, wherein X is O or S

[chemical structure]

[0569] In some embodiments, the RNAi agent is conjugated to L96 as defined in Table 1 and shown below:

[chemical structure]

[0570] Another representative carbohydrate conjugate for use in the embodiments described herein includes, but is not limited to,

[chemical structure]

when one of X or Y is an oligonucleotide, the other is a hydrogen.

[0571] In some embodiments, a suitable ligand is a ligand disclosed in WO 2019/055633, the entire contents of which are incorporated herein by reference. In one embodiment the ligand comprises the structure below:

[chemical structure]

[0572] In certain embodiments of the invention, the GalNAc or GalNAc derivative is attached to an iRNA agent of the invention via a monovalent linker. In some embodiments, the GalNAc or GalNAc derivative is attached to an iRNA agent of the invention via a bivalent linker. In yet other embodiments of the invention, the GalNAc or GalNAc derivative is attached to an iRNA agent of the invention via a trivalent linker.

[0573] In one embodiment, the double stranded RNAi agents of the invention comprise one or more GalNAc or GalNAc derivative attached to the iRNA agent. The GalNAc may be attached to any nucleotide via a linker on the sense strand or antsisense strand. The GalNac may be attached to the 5′-end of the sense strand, the 3′ end of the sense strand, the 5′-end of the antisense strand, or the 3′-end of the antisense strand. In one embodiment, the GalNAc is attached to the 3′ end of the sense strand, e.g., via a trivalent linker.

[0574] In other embodiments, the double stranded RNAi agents of the invention comprise a plurality (e.g., 2, 3, 4, 5, or 6) GalNAc or GalNAc derivatives, each independently attached to a plurality of nucleotides of the double stranded RNAi agent through a plurality of linkers, e.g., monovalent linkers.

[0575] In some embodiments, for example, when the two strands of an iRNA agent of the invention is part of one larger molecule connected by an uninterrupted chain of nucleotides between the 3′-end of one strand and the 5′-end of the respective other strand forming a hairpin loop comprising, a plurality of unpaired nucleotides, each unpaired nucleotide within the hairpin loop may independently comprise a GalNAc or GalNAc derivative attached via a monovalent linker.

[0576] In some embodiments, the carbohydrate conjugate further comprises one or more additional ligands as described above, such as, but not limited to, a PK modulator or a cell permeation peptide.

[0577] Additional carbohydrate conjugates and linkers suitable for use in the present invention include those described in PCT Publication Nos. WO 2014/179620 and WO 2014/179627, the entire contents of each of which are incorporated herein by reference.

### D. Linkers

[0578] In some embodiments, the conjugate or ligand described herein can be attached to an iRNA oligonucleotide with various linkers that can be cleavable or non-cleavable.

[0579] The term “linker” or “linking group” means an organic moiety that connects two parts of a compound, e.g., covalently attaches two parts of a compound. Linkers typically comprise a direct bond or an atom such as oxygen or sulfur, a unit such as NR8, C(O), C(O)NH, SO, SO₂, SO₂NH or a chain of atoms, such as, but not limited to, substituted or unsubstituted alkyl, substituted or unsubstituted alkenyl, substituted or unsubstituted alkynyl, arylalkyl, arylalkenyl, arylalkynyl, heteroarylalkyl, heteroarylalkenyl, heteroarylalkynyl, heterocyclylalkyl, heterocyclylalkenyl, heterocyclylalkynyl, aryl, heteroaryl, heterocyclyl, cycloalkyl, cycloalkenyl, alkylarylalkyl, alkylarylalkenyl, alkylarylalkynyl, alkenylarylalkyl, alkenylarylalkenyl, alkenylarylalkynyl, alkynylarylalkyl, alkynylarylalkenyl, alkynylarylalkynyl, alkylheteroarylalkyl, alkylheteroarylalkenyl, alkylheteroarylalkynyl, alkenylheteroarylalkyl, alkenylheteroarylalkenyl, alkenylheteroarylalkynyl, alkynylheteroarylalkyl, alkynylheteroarylalkenyl, alkynylheteroarylalkynyl, alkylheterocyclylalkyl, alkylheterocyclylalkenyl, alkylhererocyclylalkynyl, alkenylheterocyclylalkyl, alkenylheterocyclylalkenyl, alkenylheterocyclylalkynyl, alkynylheterocyclylalkyl, alkynylheterocyclylalkenyl, alkynylheterocyclylalkynyl, alkylaryl, alkenylaryl, alkynylaryl, alkylheteroaryl, alkenylheteroaryl, alkynylhereroaryl, which one or more methylenes can be interrupted or terminated by O, S, S(O), SO₂, N(R8), C(O), substituted or unsubstituted aryl, substituted or unsubstituted heteroaryl, or substituted or unsubstituted heterocyclic; where R8 is hydrogen, acyl, aliphatic, or substituted aliphatic. In one embodiment, the linker is about 1-24 atoms, 2-24, 3-24, 4-24, 5-24, 6-24, 6-18, 7-18, 8-18, 7-17, 8-17, 6-16, 7-17, or 8-16 atoms.

[0580] A cleavable linking group is one which is sufficiently stable outside the cell, but which upon entry into a target cell is cleaved to release the two parts the linker is holding together. In an exemplary embodiment, the cleavable linking group is cleaved at least about 10 times, 20, times, 30 times, 40 times, 50 times, 60 times, 70 times, 80 times, 90 times, or more, or at least 100 times faster in a target cell or under a first reference condition (which can, e.g., be selected to mimic or represent intracellular conditions) than in the blood of a subject, or under a second reference condition (which can, e.g., be selected to mimic or represent conditions found in the blood or serum).

[0581] Cleavable linking groups are susceptible to cleavage agents, e.g., pH, redox potential, or the presence of degradative molecules. Generally, cleavage agents are more prevalent or found at higher levels or activities inside cells than in serum or blood. Examples of such degradative agents include: redox agents which are selected for particular substrates or which have no substrate specificity, including, e.g., oxidative or reductive enzymes or reductive agents such as mercaptans, present in cells, that can degrade a redox cleavable linking group by reduction; esterases; endosomes or agents that can create an acidic environment, e.g., those that result in a pH of five or lower; enzymes that can hydrolyze or degrade an acid cleavable linking group by acting as a general acid, peptidases (which can be substrate specific), and phosphatases.

[0582] A cleavable linkage group, such as a disulfide bond can be susceptible to pH. The pH of human serum is 7.4, while the average intracellular pH is slightly lower, ranging from about 7.1-7.3. Endosomes have a more acidic pH, in the range of 5.5-6.0, and lysosomes have an even more acidic pH at around 5.0. Some linkers will have a cleavable linking group that is cleaved at a selected pH, thereby releasing a cationic lipid from the ligand inside the cell, or into the desired compartment of the cell.

[0583] A linker can include a cleavable linking group that is cleavable by a particular enzyme. The type of cleavable linking group incorporated into a linker can depend on the cell to be targeted. For example, a liver-targeting ligand can be linked to a cationic lipid through a linker that includes an ester group. Liver cells are rich in esterases, and therefore the linker will be cleaved more efficiently in liver cells than in cell types that are not esterase-rich. Other cell-types rich in esterases include cells of the lung, renal cortex, and testis.

[0584] Linkers that contain peptide bonds can be used when targeting cell types rich in peptidases, such as liver cells and synoviocytes.

[0585] In general, the suitability of a candidate cleavable linking group can be evaluated by testing the ability of a degradative agent (or condition) to cleave the candidate linking group. It will also be desirable to also test the candidate cleavable linking group for the ability to resist cleavage in the blood or when in contact with other non-target tissue. Thus, one can determine the relative susceptibility to cleavage between a first and a second condition, where the first is selected to be indicative of cleavage in a target cell and the second is selected to be indicative of cleavage in other tissues or biological fluids, e.g., blood or serum. The evaluations can be carried out in cell free systems, in cells, in cell culture, in organ or tissue culture, or in whole animals. It can be useful to make initial evaluations in cell-free or culture conditions and to confirm by further evaluations in whole animals. In certain embodiments, useful candidate compounds are cleaved at least about 2, 4, 10, 20, 30, 40, 50, 60, 70, 80, 90, or 100 times faster in the cell (or under in vitro conditions selected to mimic intracellular conditions) as compared to blood or serum (or under in vitro conditions selected to mimic extracellular conditions).

i. Redox Cleavable Linking Groups

[0586] In certain embodiments, a cleavable linking group is a redox cleavable linking group that is cleaved upon reduction or oxidation. An example of reductively cleavable linking group is a disulphide linking group (—S—S—). To determine if a candidate cleavable linking group is a suitable “reductively cleavable linking group,” or for example is suitable for use with a particular iRNA moiety and particular targeting agent one can look to methods described herein. For example, a candidate can be evaluated by incubation with dithiothreitol (DTT), or other reducing agent using reagents know in the art, which mimic the rate of cleavage which would be observed in a cell, e.g., a target cell. The candidates can also be evaluated under conditions which are selected to mimic blood or serum conditions. In one, candidate compounds are cleaved by at most about 10% in the blood. In other embodiments, useful candidate compounds are degraded at least about 2, 4, 10, 20, 30, 40, 50, 60, 70, 80, 90, or about 100 times faster in the cell (or under in vitro conditions selected to mimic intracellular conditions) as compared to blood (or under in vitro conditions selected to mimic extracellular conditions). The rate of cleavage of candidate compounds can be determined using standard enzyme kinetics assays under conditions chosen to mimic intracellular media and compared to conditions chosen to mimic extracellular media.

ii. Phosphate-Based Cleavable Linking Groups

[0587] In other embodiments, a cleavable linker comprises a phosphate-based cleavable linking group. A phosphate-based cleavable linking group is cleaved by agents that degrade or hydrolyze the phosphate group. An example of an agent that cleaves phosphate groups in cells are enzymes such as phosphatases in cells. Examples of phosphate-based linking groups are —O—P(O)(ORk)-O—, —O—P(S)(ORk)-O—, —O—P(S)(SRk)-O—, —S—P(O)(ORk)-O—, —O—P(O)(ORk)-S—, —S—P(O)(ORk)-S—, —O—P(S)(ORk)-S—, —S—P(S)(ORk)-O—, —O—P(O)(Rk)-O—, —O—P(S)(Rk)-O—, —S—P(O)(Rk)-O—, —S—P(S)(Rk)-O—, —S—P(O)(Rk)-S—, —O—P(S)(Rk)-S—, wherein Rk at each occurrence can be, independently, C1-C20 alkyl, C1-C20 haloalkyl, C6-C10 aryl, or C7-C12 aralkyl. Exemplary embodiments include —O—P(O)(OH)—O—, —O—P(S)(OH)—O—, —O—P(S)(SH)—O—, —S—P(O)(OH)—O—, —O—P(O)(OH)—S—, —S—P(O)(OH)—S—, —O—P(S)(OH)—S—, —S—P(S)(OH)—O—, —O—P(O)(H)—O—, —O—P(S)(H)—O—, —S—P(O)(H)—O, —S—P(S)(H)—O—, —S—P(O)(H)—S—, and —O—P(S)(H)—S—. In certain embodiments a phosphate-based linking group is —O—P(O)(OH)—O—. These candidates can be evaluated using methods analogous to those described above.

iii. Acid Cleavable Linking Groups

[0588] In other embodiments, a cleavable linker comprises an acid cleavable linking group. An acid cleavable linking group is a linking group that is cleaved under acidic conditions. In certain embodiments acid cleavable linking groups are cleaved in an acidic environment with a pH of about 6.5 or lower (e.g., about 6.0, 5.5, 5.0, or lower), or by agents such as enzymes that can act as a general acid. In a cell, specific low pH organelles, such as endosomes and lysosomes can provide a cleaving environment for acid cleavable linking groups. Examples of acid cleavable linking groups include but are not limited to hydrazones, esters, and esters of amino acids. Acid cleavable groups can have the general formula —C═NN—, C(O)O, or —OC(O). An exemplary embodiment is when the carbon attached to the oxygen of the ester (the alkoxy group) is an aryl group, substituted alkyl group, or tertiary alkyl group such as dimethyl pentyl or t-butyl. These candidates can be evaluated using methods analogous to those described above.

iv. Ester-Based Linking Groups

[0589] In other embodiments, a cleavable linker comprises an ester-based cleavable linking group. An ester-based cleavable linking group is cleaved by enzymes such as esterases and amidases in cells. Examples of ester-based cleavable linking groups include, but are not limited to, esters of alkylene, alkenylene and alkynylene groups. Ester cleavable linking groups have the general formula —C(O)O—, or —OC(O)—. These candidates can be evaluated using methods analogous to those described above.

v. Peptide-Based Cleaving Groups

[0590] In yet other embodiments, a cleavable linker comprises a peptide-based cleavable linking group. A peptide-based cleavable linking group is cleaved by enzymes such as peptidases and proteases in cells. Peptide-based cleavable linking groups are peptide bonds formed between amino acids to yield oligopeptides (e.g., dipeptides, tripeptides etc.) and polypeptides. Peptide-based cleavable groups do not include the amide group (—C(O)NH—). The amide group can be formed between any alkylene, alkenylene or alkynelene. A peptide bond is a special type of amide bond formed between amino acids to yield peptides and proteins. The peptide based cleavage group is generally limited to the peptide bond (i.e., the amide bond) formed between amino acids yielding peptides and proteins and does not include the entire amide functional group. Peptide-based cleavable linking groups have the general formula —NHCHRAC(O)NHCHRBC(O)—, where RA and RB are the R groups of the two adjacent amino acids. These candidates can be evaluated using methods analogous to those described above.

[0591] In some embodiments, an iRNA of the invention is conjugated to a carbohydrate through a linker. Non-limiting examples of iRNA carbohydrate conjugates with linkers of the compositions and methods of the invention include but are not limited to

[chemical structure]

[chemical structure]

[chemical structure]

when one of X or Y is an oligonucleotide, the other is a hydrogen.

[0592] In certain embodiments of the compositions and methods of the invention, a ligand is one or more “GalNAC” (N-acetylgalactosamine) derivatives attached through a bivalent or trivalent branched linker.

[0593] In one embodiment, a dsRNA of the invention is conjugated to a bivalent or trivalent branched linker selected from the group of structures shown in any of formula (XLV)-(XLVIII):

[chemical structure]

wherein:
[0594] q^{2A}, q^{2B}, q^{3A}, q^{3B}, q^{4A}, q^{4B}, q^{5A}, q⁵B and q⁵C represent independently for each occurrence 0-20 and wherein the repeating unit can be the same or different;
[0595] P^{2A}, P^{2B}, P^{3A}, P^{3B}, P^{4A}, P^{4B}, P^{5A}, P^{5B}, P^{5C}, T^{2A}, T^{2B}, T^{3A}, T^{3B}, T^{4A}, T^{4B}, T^{4A}, T^{5B}, T^{5C} are each independently for each occurrence absent, CO, NH, O, S, OC(O), NHC(O), CH₂, CH₂NH or CH₂O;
[0596] Q^{2A}, Q^{2B}, Q^{3A}, Q^{3B}, Q^{4A}, Q^{4B}, Q^{5A} Q^{5B}, Q^{5C} are independently for each occurrence absent, alkylene, substituted alkylene wherein one or more methylenes can be interrupted or terminated by one or more of O, S, S(O), SO₂, N(R^{N}), C(R′)═C(R″), C≡C or C(O);
[0597] R^{2A}, R^{2B}, R^{3A}, R^{3A}, R^{4A}, R^{4B}, R^{5A}, R^{5B}, R^{5C} are each independently for each occurrence absent, NH, O, S, CH₂, C(O)O, C(O)NH, NHCH(R^{a})C(O), —C(OCH(R^{a})—NH—, CO, CH═N—O,

[chemical structure]

or heterocyclyl;
[0598] L^{2A}, L^{2B}, L^{3A}, L^{3B}, L^{4A}, L^{4B}, L^{5A}, L^{5B} and L^{5C} represent the ligand; i.e. each independently for each occurrence a monosaccharide (such as GalNAc), disaccharide, trisaccharide, tetrasaccharide, oligosaccharide, or polysaccharide; and R^{a} is H or amino acid side chain. Trivalent conjugating GalNAc derivatives are particularly useful for use with RNAi agents for inhibiting the expression of a target gene, such as those of formula (XLIX):

[chemical structure]

[0599] wherein L^{5A}, L^{5B} and L^{5C} represent a monosaccharide, such as GalNAc derivative.

[0600] Examples of suitable bivalent and trivalent branched linker groups conjugating GalNAc derivatives include, but are not limited to, the structures recited above as formulas II, VII, XI, X, and XIII.

[0601] Representative U.S. patents that teach the preparation of RNA conjugates include, but are not limited to, U.S. Pat. Nos. 4,828,979; 4,948,882; 5,218,105; 5,525,465; 5,541,313; 5,545,730; 5,552,538; 5,578,717, 5,580,731; 5,591,584; 5,109,124; 5,118,802; 5,138,045; 5,414,077; 5,486,603; 5,512,439; 5,578,718; 5,608,046; 4,587,044; 4,605,735; 4,667,025; 4,762,779; 4,789,737; 4,824,941; 4,835,263; 4,876,335; 4,904,582; 4,958,013; 5,082,830; 5,112,963; 5,214,136; 5,082,830; 5,112,963; 5,214,136; 5,245,022; 5,254,469; 5,258,506; 5,262,536; 5,272,250; 5,292,873; 5,317,098; 5,371,241, 5,391,723; 5,416,203, 5,451,463; 5,510,475; 5,512,667; 5,514,785; 5,565,552; 5,567,810; 5,574,142; 5,585,481; 5,587,371; 5,595,726; 5,597,696; 5,599,923; 5,599,928; 5,688,941; 6,294,664; 6,320,017; 6,576,752; 6,783,931; 6,900,297; 7,037,646; and 8,106,022, the entire contents of each of which are hereby incorporated herein by reference.

[0602] It is not necessary for all positions in a given compound to be uniformly modified, and in fact more than one of the aforementioned modifications can be incorporated in a single compound or even at a single nucleoside within an iRNA. The present invention also includes iRNA compounds that are chimeric compounds.

[0603] “Chimeric” iRNA compounds or “chimeras,” in the context of this invention, are iRNA compounds, such as, dsRNAi agents, that contain two or more chemically distinct regions, each made up of at least one monomer unit, i.e., a nucleotide in the case of a dsRNA compound. These iRNAs typically contain at least one region wherein the RNA is modified so as to confer upon the iRNA increased resistance to nuclease degradation, increased cellular uptake, or increased binding affinity for the target nucleic acid. An additional region of the iRNA can serve as a substrate for enzymes capable of cleaving RNA:DNA or RNA:RNA hybrids. By way of example, RNase H is a cellular endonuclease which cleaves the RNA strand of an RNA:DNA duplex. Activation of RNase H, therefore, results in cleavage of the RNA target, thereby greatly enhancing the efficiency of iRNA inhibition of gene expression. Consequently, comparable results can often be obtained with shorter iRNAs when chimeric dsRNAs are used, compared to phosphorothioate deoxy dsRNAs hybridizing to the same target region. Cleavage of the RNA target can be routinely detected by gel electrophoresis and, if necessary, associated nucleic acid hybridization techniques known in the art.

[0604] In certain instances, the RNA of an iRNA can be modified by a non-ligand group. A number of non-ligand molecules have been conjugated to iRNAs in order to enhance the activity, cellular distribution or cellular uptake of the iRNA, and procedures for performing such conjugations are available in the scientific literature. Such non-ligand moieties have included lipid moieties, such as cholesterol (Kubo, T. et al., Biochem. Biophys. Res. Comm., 2007, 365(1):54-61; Letsinger et al., Proc. Natl. Acad. Sci. USA, 1989, 86:6553), cholic acid (Manoharan et al., Bioorg. Med. Chem. Lett., 1994, 4:1053), a thioether, e.g., hexyl-S-tritylthiol (Manoharan et al., Ann. N.Y. Acad. Sci., 1992, 660:306; Manoharan et al., Bioorg. Med. Chem. Let., 1993, 3:2765), a thiocholesterol (Oberhauser et al., Nucl. Acids Res., 1992, 20:533), an aliphatic chain, e.g., dodecandiol or undecyl residues (Saison-Behmoaras et al., EMBO J., 1991, 10:111; Kabanov et al., FEBS Lett., 1990, 259:327; Svinarchuk et al., Biochimie, 1993, 75:49), a phospholipid, e.g., di-hexadecyl-rac-glycerol or triethylammonium 1,2-di-O-hexadecyl-rac-glycero-3-H-phosphonate (Manoharan et al., Tetrahedron Lett., 1995, 36:3651; Shea et al., Nucl. Acids Res., 1990, 18:3777), a polyamine or a polyethylene glycol chain (Manoharan et al., Nucleosides & Nucleotides, 1995, 14:969), or adamantane acetic acid (Manoharan et al., Tetrahedron Lett., 1995, 36:3651), a palmityl moiety (Mishra et al., Biochim. Biophys. Acta, 1995, 1264:229), or an octadecylamine or hexylamino-carbonyl-oxycholesterol moiety (Crooke et al., J. Pharmacol. Exp. Ther., 1996, 277:923). Representative United States patents that teach the preparation of such RNA conjugates have been listed above. Typical conjugation protocols involve the synthesis of RNAs bearing an aminolinker at one or more positions of the sequence. The amino group is then reacted with the molecule being conjugated using appropriate coupling or activating reagents. The conjugation reaction can be performed either with the RNA still bound to the solid support or following cleavage of the RNA, in solution phase. Purification of the RNA conjugate by HPLC typically affords the pure conjugate.

### IV. Delivery of an iRNA of the Invention

[0605] The delivery of an iRNA of the invention to a cell e.g., a cell within a subject, such as a human subject (e.g., a subject in need thereof, such as a subject susceptible to or diagnosed with a PRODH2-associated disorder, e.g., primary hyperoxaluria and/or kidney stone diseases, can be achieved in a number of different ways. For example, delivery may be performed by contacting a cell with an iRNA of the invention either in vitro or in vivo. In vivo delivery may also be performed directly by administering a composition comprising an iRNA, e.g., a dsRNA, to a subject. Alternatively, in vivo delivery may be performed indirectly by administering one or more vectors that encode and direct the expression of the iRNA. These alternatives are discussed further below.

[0606] In general, any method of delivering a nucleic acid molecule (in vitro or in vivo) can be adapted for use with an iRNA of the invention (see e.g., Akhtar S. and Julian R L. (1992) Trends Cell. Biol. 2(5):139-144 and WO94/02595, which are incorporated herein by reference in their entireties). For in vivo delivery, factors to consider in order to deliver an iRNA molecule include, for example, biological stability of the delivered molecule, prevention of non-specific effects, and accumulation of the delivered molecule in the target tissue. RNA interference has also shown success with local delivery to the CNS by direct injection (Dorn, G., et al. (2004) Nucleic Acids 32:e49; Tan, P H., et al (2005) Gene Ther. 12:59-66; Makimura, H., et al (2002) BMC Neurosci. 3:18; Shishkina, G T., et al (2004) Neuroscience 129:521-528; Thakker, E R., et al (2004) Proc. Natl. Acad. Sci. U.S.A. 101:17270-17275; Akaneya, Y., et al (2005) J. Neurophysiol. 93:594-602). Modification of the RNA or the pharmaceutical carrier can also permit targeting of the iRNA to the target tissue and avoid undesirable off-target effects. iRNA molecules can be modified by chemical conjugation to lipophilic groups such as cholesterol to enhance cellular uptake and prevent degradation. For example, an iRNA directed against ApoB conjugated to a lipophilic cholesterol moiety was injected systemically into mice and resulted in knockdown of apoB mRNA in both the liver and jejunum (Soutschek, J., et al (2004) Nature 432:173-178).

[0607] In an alternative embodiment, the iRNA can be delivered using drug delivery systems such as a nanoparticle, a dendrimer, a polymer, liposomes, or a cationic delivery system. Positively charged cationic delivery systems facilitate binding of an iRNA molecule (negatively charged) and also enhance interactions at the negatively charged cell membrane to permit efficient uptake of an iRNA by the cell. Cationic lipids, dendrimers, or polymers can either be bound to an iRNA, or induced to form a vesicle or micelle (see e.g., Kim S H, et al (2008) Journal of Controlled Release 129(2):107-116) that encases an iRNA. The formation of vesicles or micelles further prevents degradation of the iRNA when administered systemically. Methods for making and administering cationic-iRNA complexes are well within the abilities of one skilled in the art (see e.g., Sorensen, D R, et al (2003) J. Mol. Biol 327:761-766; Verma, U N, et al (2003) Clin. Cancer Res. 9:1291-1300; Arnold, A S et al (2007) J. Hypertens. 25:197-205, which are incorporated herein by reference in their entirety). Some non-limiting examples of drug delivery systems useful for systemic delivery of iRNAs include DOTAP (Sorensen, D R., et al (2003), supra; Verma, U N, et al (2003), supra), “solid nucleic acid lipid particles” (Zimmermann, T S, et al (2006) Nature 441:111-114), cardiolipin (Chien, P Y, et al (2005) Cancer Gene Ther. 12:321-328; Pal, A, et al (2005) Int J. Oncol. 26:1087-1091), polyethyleneimine (Bonnet M E, et al (2008) Pharm. Res. August 16 Epub ahead of print; Aigner, A. (2006) J. Biomed. Biotechnol. 71659), Arg-Gly-Asp (RGD) peptides (Liu, S. (2006) Mol. Pharm. 3:472-487), and polyamidoamines (Tomalia, D A, et al (2007) Biochem. Soc. Trans. 35:61-67; Yoo, H., et al (1999) Pharm. Res. 16:1799-1804). In some embodiments, an iRNA forms a complex with cyclodextrin for systemic administration. Methods for administration and pharmaceutical compositions of iRNAs and cyclodextrins can be found in U.S. Pat. No. 7,427,605, which is herein incorporated by reference in its entirety.

A. Vector Encoded iRNAs of the Invention

[0608] iRNA targeting the PRODH2 gene can be expressed from transcription units inserted into DNA or RNA vectors (see, e.g., Couture, A, et al., TIG. (1996), 12:5-10; Skillern, A, et al., International PCT Publication No. WO 00/22113, Conrad, International PCT Publication No. WO 00/22114, and Conrad, U.S. Pat. No. 6,054,299). Expression can be transient (on the order of hours to weeks) or sustained (weeks to months or longer), depending upon the specific construct used and the target tissue or cell type. These transgenes can be introduced as a linear construct, a circular plasmid, or a viral vector, which can be an integrating or non-integrating vector. The transgene can also be constructed to permit it to be inherited as an extrachromosomal plasmid (Gassmann, et al., Proc. Natl. Acad. Sci. USA (1995) 92:1292).

[0609] Viral vector systems which can be utilized with the methods and compositions described herein include, but are not limited to, (a) adenovirus vectors; (b) retrovirus vectors, including but not limited to lentiviral vectors, moloney murine leukemia virus, etc.; (c) adeno-associated virus vectors; (d) herpes simplex virus vectors; (e) SV 40 vectors; (f) polyoma virus vectors; (g) papilloma virus vectors; (h) picornavirus vectors; (i) pox virus vectors such as an orthopox, e.g., vaccinia virus vectors or avipox, e.g. canary pox or fowl pox; and (j) a helper-dependent or gutless adenovirus. Replication-defective viruses can also be advantageous. Different vectors will or will not become incorporated into the cells' genome. The constructs can include viral sequences for transfection, if desired. Alternatively, the construct can be incorporated into vectors capable of episomal replication, e.g. EPV and EBV vectors. Constructs for the recombinant expression of an iRNA will generally require regulatory elements, e.g., promoters, enhancers, etc., to ensure the expression of the iRNA in target cells. Other aspects to consider for vectors and constructs are known in the art.

### V. Pharmaceutical Compositions of the Invention

[0610] The present invention also includes pharmaceutical compositions and formulations which include the iRNAs of the invention. In one embodiment, provided herein are pharmaceutical compositions containing an iRNA, as described herein, and a pharmaceutically acceptable carrier. The pharmaceutical compositions containing the iRNA are useful for preventing or treating a PRODH2-associated disorder, e.g., primary hyperoxaluria and/or kidney stone diseases. Such pharmaceutical compositions are formulated based on the mode of delivery. One example is compositions that are formulated for systemic administration via parenteral delivery, e.g., by subcutaneous (SC), intramuscular (IM), or intravenous (IV) delivery. The pharmaceutical compositions of the invention may be administered in dosages sufficient to inhibit expression of a PRODH2 gene.

[0611] In some embodiments, the pharmaceutical compositions of the invention are sterile. In another embodiment, the pharmaceutical compositions of the invention are pyrogen free.

[0612] The pharmaceutical compositions of the invention may be administered in dosages sufficient to inhibit expression of a PRODH2 gene. In general, a suitable dose of an iRNA of the invention will be in the range of about 0.001 to about 200.0 milligrams per kilogram body weight of the recipient per day, generally in the range of about 1 to 50 mg per kilogram body weight per day. Typically, a suitable dose of an iRNA of the invention will be in the range of about 0.1 mg/kg to about 5.0 mg/kg, such as, about 0.3 mg/kg and about 3.0 mg/kg. A repeat-dose regimen may include administration of a therapeutic amount of iRNA on a regular basis, such as every month, once every 3-6 months, or once a year. In certain embodiments, the iRNA is administered about once per month to about once per six months.

[0613] After an initial treatment regimen, the treatments can be administered on a less frequent basis. Duration of treatment can be determined based on the severity of disease.

[0614] In other embodiments, a single dose of the pharmaceutical compositions can be long lasting, such that doses are administered at not more than 1, 2, 3, or 4 month intervals. In some embodiments of the invention, a single dose of the pharmaceutical compositions of the invention is administered about once per month. In other embodiments of the invention, a single dose of the pharmaceutical compositions of the invention is administered quarterly (i.e., about every three months). In other embodiments of the invention, a single dose of the pharmaceutical compositions of the invention is administered twice per year (i.e., about once every six months).

[0615] The skilled artisan will appreciate that certain factors can influence the dosage and timing required to effectively treat a subject, including but not limited to mutations present in the subject, previous treatments, the general health or age of the subject, and other diseases present. Moreover, treatment of a subject with a prophylactically or therapeutically effective amount, as appropriate, of a composition can include a single treatment or a series of treatments.

[0616] The iRNA can be delivered in a manner to target a particular tissue (e.g., hepatocytes).

[0617] Pharmaceutical compositions of the present invention include, but are not limited to, solutions, emulsions, and liposome-containing formulations. These compositions can be generated from a variety of components that include, but are not limited to, preformed liquids, self-emulsifying solids, and self-emulsifying semisolids. Formulations include those that target the liver.

[0618] The pharmaceutical formulations of the present invention, which can conveniently be presented in unit dosage form, can be prepared according to conventional techniques well known in the pharmaceutical industry. Such techniques include the step of bringing into association the active ingredients with the pharmaceutical carrier(s) or excipient(s). In general, the formulations are prepared by uniformly and intimately bringing into association the active ingredients with liquid carriers.

### A. Additional Formulations

[0619] i. Emulsions

[0620] The compositions of the present invention can be prepared and formulated as emulsions. Emulsions are typically heterogeneous systems of one liquid dispersed in another in the form of droplets usually exceeding 0.1 μm in diameter (see e.g., Ansel's Pharmaceutical Dosage Forms and Drug Delivery Systems, Allen, L V., Popovich N G., and Ansel H C., 2004, Lippincott Williams & Wilkins (8th ed.), New York, NY; Idson, in Pharmaceutical Dosage Forms, Lieberman, Rieger and Banker (Eds.), 1988, Marcel Dekker, Inc., New York, N.Y., volume 1, p. 199; Rosoff, in Pharmaceutical Dosage Forms, Lieberman, Rieger and Banker (Eds.), 1988, Marcel Dekker, Inc., New York, N.Y., Volume 1, p. 245; Block in Pharmaceutical Dosage Forms, Lieberman, Rieger and Banker (Eds.), 1988, Marcel Dekker, Inc., New York, N.Y., volume 2, p. 335; Higuchi et al., in Remington's Pharmaceutical Sciences, Mack Publishing Co., Easton, Pa., 1985, p. 301). Emulsions are often biphasic systems comprising two immiscible liquid phases intimately mixed and dispersed with each other. In general, emulsions can be of either the water-in-oil (w/o) or the oil-in-water (o/w) variety. When an aqueous phase is finely divided into and dispersed as minute droplets into a bulk oily phase, the resulting composition is called a water-in-oil (w/o) emulsion. Alternatively, when an oily phase is finely divided into and dispersed as minute droplets into a bulk aqueous phase, the resulting composition is called an oil-in-water (o/w) emulsion. Emulsions can contain additional components in addition to the dispersed phases, and the active drug which can be present as a solution either in the aqueous phase, oily phase or itself as a separate phase. Pharmaceutical excipients such as emulsifiers, stabilizers, dyes, and anti-oxidants can also be present in emulsions as needed. Pharmaceutical emulsions can also be multiple emulsions that are comprised of more than two phases such as, for example, in the case of oil-in-water-in-oil (o/w/o) and water-in-oil-in-water (w/o/w) emulsions. Such complex formulations often provide certain advantages that simple binary emulsions do not. Multiple emulsions in which individual oil droplets of an o/w emulsion enclose small water droplets constitute a w/o/w emulsion. Likewise a system of oil droplets enclosed in globules of water stabilized in an oily continuous phase provides an o/w/o emulsion.

[0621] Emulsions are characterized by little or no thermodynamic stability. Often, the dispersed or discontinuous phase of the emulsion is well dispersed into the external or continuous phase and maintained in this form through the means of emulsifiers or the viscosity of the formulation. Other means of stabilizing emulsions entail the use of emulsifiers that can be incorporated into either phase of the emulsion. Emulsifiers can broadly be classified into four categories: synthetic surfactants, naturally occurring emulsifiers, absorption bases, and finely dispersed solids (see e.g., Ansel's Pharmaceutical Dosage Forms and Drug Delivery Systems, Allen, L V., Popovich N G., and Ansel H C., 2004, Lippincott Williams & Wilkins (8th ed.), New York, NY; Idson, in Pharmaceutical Dosage Forms, Lieberman, Rieger and Banker (Eds.), 1988, Marcel Dekker, Inc., New York, N.Y., volume 1, p. 199).

[0622] Synthetic surfactants, also known as surface active agents, have found wide applicability in the formulation of emulsions and have been reviewed in the literature (see e.g., Ansel's Pharmaceutical Dosage Forms and Drug Delivery Systems, Allen, L V., Popovich N G., and Ansel H C., 2004, Lippincott Williams & Wilkins (8th ed.), New York, NY; Rieger, in Pharmaceutical Dosage Forms, Lieberman, Rieger and Banker (Eds.), 1988, Marcel Dekker, Inc., New York, N.Y., volume 1, p. 285; Idson, in Pharmaceutical Dosage Forms, Lieberman, Rieger and Banker (Eds.), Marcel Dekker, Inc., New York, N.Y., 1988, volume 1, p. 199). Surfactants are typically amphiphilic and comprise a hydrophilic and a hydrophobic portion. The ratio of the hydrophilic to the hydrophobic nature of the surfactant has been termed the hydrophile/lipophile balance (HLB) and is a valuable tool in categorizing and selecting surfactants in the preparation of formulations. Surfactants can be classified into different classes based on the nature of the hydrophilic group: nonionic, anionic, cationic, and amphoteric (see e.g., Ansel's Pharmaceutical Dosage Forms and Drug Delivery Systems, Allen, L V., Popovich N G., and Ansel H C., 2004, Lippincott Williams & Wilkins (8th ed.), New York, NY Rieger, in Pharmaceutical Dosage Forms, Lieberman, Rieger and Banker (Eds.), 1988, Marcel Dekker, Inc., New York, N.Y., volume 1, p. 285).

[0623] A large variety of non-emulsifying materials are also included in emulsion formulations and contribute to the properties of emulsions. These include fats, oils, waxes, fatty acids, fatty alcohols, fatty esters, humectants, hydrophilic colloids, preservatives, and antioxidants (Block, in Pharmaceutical Dosage Forms, Lieberman, Rieger and Banker (Eds.), 1988, Marcel Dekker, Inc., New York, N.Y., volume 1, p. 335; Idson, in Pharmaceutical Dosage Forms, Lieberman, Rieger and Banker (Eds.), 1988, Marcel Dekker, Inc., New York, N.Y., volume 1, p. 199).

[0624] The application of emulsion formulations via dermatological, oral, and parenteral routes, and methods for their manufacture have been reviewed in the literature (see e.g., Ansel's Pharmaceutical Dosage Forms and Drug Delivery Systems, Allen, L V., Popovich N G., and Ansel H C., 2004, Lippincott Williams & Wilkins (8th ed.), New York, NY; Idson, in Pharmaceutical Dosage Forms, Lieberman, Rieger and Banker (Eds.), 1988, Marcel Dekker, Inc., New York, N.Y., volume 1, p. 199).

ii. Microemulsions

[0625] In one embodiment of the present invention, the compositions of iRNAs and nucleic acids are formulated as microemulsions. A microemulsion can be defined as a system of water, oil, and amphiphile which is a single optically isotropic and thermodynamically stable liquid solution (see e.g., Ansel's Pharmaceutical Dosage Forms and Drug Delivery Systems, Allen, L V., Popovich N G., and Ansel H C., 2004, Lippincott Williams & Wilkins (8th ed.), New York, NY; Rosoff, in Pharmaceutical Dosage Forms, Lieberman, Rieger and Banker (Eds.), 1988, Marcel Dekker, Inc., New York, N.Y., volume 1, p. 245). Typically microemulsions are systems that are prepared by first dispersing an oil in an aqueous surfactant solution and then adding a sufficient amount of a fourth component, generally an intermediate chain-length alcohol to form a transparent system. Therefore, microemulsions have also been described as thermodynamically stable, isotropically clear dispersions of two immiscible liquids that are stabilized by interfacial films of surface-active molecules (Leung and Shah, in: Controlled Release of Drugs: Polymers and Aggregate Systems, Rosoff, M., Ed., 1989, VCH Publishers, New York, pages 185-215).

iii. Microparticles

[0626] An iRNA of the invention may be incorporated into a particle, e.g., a microparticle. Microparticles can be produced by spray-drying, but may also be produced by other methods including lyophilization, evaporation, fluid bed drying, vacuum drying, or a combination of these techniques.

iv. Penetration Enhancers

[0627] In one embodiment, the present invention employs various penetration enhancers to effect the efficient delivery of nucleic acids, particularly iRNAs, to the skin of animals. Most drugs are present in solution in both ionized and nonionized forms. However, usually only lipid soluble or lipophilic drugs readily cross cell membranes. It has been discovered that even non-lipophilic drugs can cross cell membranes if the membrane to be crossed is treated with a penetration enhancer. In addition to aiding the diffusion of non-lipophilic drugs across cell membranes, penetration enhancers also enhance the permeability of lipophilic drugs.

[0628] Penetration enhancers can be classified as belonging to one of five broad categories, i.e., surfactants, fatty acids, bile salts, chelating agents, and non-chelating non-surfactants (see e.g., Malmsten, M. Surfactants and polymers in drug delivery, Informa Health Care, New York, NY, 2002; Lee et al., Critical Reviews in Therapeutic Drug Carrier Systems, 1991, p. 92). Each of the above mentioned classes of penetration enhancers and their use in manufacture of pharmaceutical compositions and delivery of pharmaceutical agents are well known in the art.

v. Excipients

[0629] In contrast to a carrier compound, a “pharmaceutical carrier” or “excipient” is a pharmaceutically acceptable solvent, suspending agent, or any other pharmacologically inert vehicle for delivering one or more nucleic acids to an animal. The excipient can be liquid or solid and is selected, with the planned manner of administration in mind, so as to provide for the desired bulk, consistency, etc., when combined with a nucleic acid and the other components of a given pharmaceutical composition. Such agent are well known in the art.

vi. Other Components

[0630] The compositions of the present invention can additionally contain other adjunct components conventionally found in pharmaceutical compositions, at their art-established usage levels. Thus, for example, the compositions can contain additional, compatible, pharmaceutically-active materials such as, for example, antipruritics, astringents, local anesthetics or anti-inflammatory agents, or can contain additional materials useful in physically formulating various dosage forms of the compositions of the present invention, such as dyes, flavoring agents, preservatives, antioxidants, opacifiers, thickening agents and stabilizers. However, such materials, when added, should not unduly interfere with the biological activities of the components of the compositions of the present invention. The formulations can be sterilized and, if desired, mixed with auxiliary agents, e.g., lubricants, preservatives, stabilizers, wetting agents, emulsifiers, salts for influencing osmotic pressure, buffers, colorings, flavorings, or aromatic substances, and the like which do not deleteriously interact with the nucleic acid(s) of the formulation.

[0631] Aqueous suspensions can contain substances which increase the viscosity of the suspension including, for example, sodium carboxymethylcellulose, sorbitol, or dextran. The suspension can also contain stabilizers.

[0632] In some embodiments, pharmaceutical compositions featured in the invention include (a) one or more iRNA and (b) one or more agents which function by a non-iRNA mechanism and which are useful in treating a PRODH2-associated disorder, e.g., primary hyperoxaluria.

[0633] Toxicity and prophylactic efficacy of such compounds can be determined by standard pharmaceutical procedures in cell cultures or experimental animals, e.g., for determining the LD50 (the dose lethal to 50% of the population) and the ED50 (the dose prophylactically effective in 50% of the population). The dose ratio between toxic and therapeutic effects is the therapeutic index and it can be expressed as the ratio LD50/ED50. Compounds that exhibit high therapeutic indices are preferred.

[0634] The data obtained from cell culture assays and animal studies can be used in formulating a range of dosage for use in humans. The dosage of compositions featured herein in the invention lies generally within a range of circulating concentrations that include the ED50, such as, an ED80 or ED90, with little or no toxicity. The dosage can vary within this range depending upon the dosage form employed and the route of administration utilized. For any compound used in the methods featured in the invention, the prophylactically effective dose can be estimated initially from cell culture assays. A dose can be formulated in animal models to achieve a circulating plasma concentration range of the compound or, when appropriate, of the polypeptide product of a target sequence (e.g., achieving a decreased concentration of the polypeptide) that includes the IC50 (i.e., the concentration of the test compound which achieves a half-maximal inhibition of symptoms) or higher levels of inhibition as determined in cell culture. Such information can be used to more accurately determine useful doses in humans. Levels in plasma can be measured, for example, by high performance liquid chromatography.

[0635] In addition to their administration, as discussed above, the iRNAs featured in the invention can be administered in combination with other known agents used for the prevention or treatment of a PRODH2-associated disorder, e.g., primary hyperoxaluria. In any event, the administering physician can adjust the amount and timing of iRNA administration on the basis of results observed using standard measures of efficacy known in the art or described herein.

### VI. Methods for Inhibiting PRODH2 Expression

[0636] The present invention also provides methods of inhibiting expression of a PRODH2 gene in a cell. The methods include contacting a cell with an RNAi agent, e.g., double stranded RNA agent, in an amount effective to inhibit expression of PRODH2 in the cell, thereby inhibiting expression of PRODH2 in the cell.

[0637] Contacting of a cell with an iRNA, e.g., a double stranded RNA agent, may be done in vitro or in vivo. Contacting a cell in vivo with the iRNA includes contacting a cell or group of cells within a subject, e.g., a human subject, with the iRNA. Combinations of in vitro and in vivo methods of contacting a cell are also possible. Contacting a cell may be direct or indirect, as discussed above. Furthermore, contacting a cell may be accomplished via a targeting ligand, including any ligand described herein or known in the art. In some embodiments, the targeting ligand is a carbohydrate moiety, e.g., a GalNAc₃ ligand, or any other ligand that directs the RNAi agent to a site of interest.

[0638] The term “inhibiting,” as used herein, is used interchangeably with “reducing,” “silencing,” “downregulating”, “suppressing”, and other similar terms, and includes any level of inhibition.

[0639] The phrase “inhibiting expression of a PRODH2” is intended to refer to inhibition of expression of any PRODH2 gene (such as, e.g., a mouse PRODH2 3 gene, a rat PRODH2 gene, a monkey PRODH2 gene, or a human PRODH2 gene) as well as variants or mutants of a PRODH2 gene. Thus, the PRODH2 gene may be a wild-type PRODH2 gene, a mutant PRODH2 gene, or a transgenic PRODH2 gene in the context of a genetically manipulated cell, group of cells, or organism.

[0640] “Inhibiting expression of a PRODH2 gene” includes any level of inhibition of a PRODH2 gene, e.g., at least partial suppression of the expression of a PRODH2 gene. The expression of the PRODH2 gene may be assessed based on the level, or the change in the level, of any variable associated with PRODH2 gene expression, e.g., PRODH2 mRNA level or PRODH2 protein level. The expression of a PRODH2 may also be assessed indirectly based on the glyoxylate level, the oxalate level and/or the glycolate level in tissues or serum or urine. This level may be assessed in an individual cell or in a group of cells, including, for example, a sample derived from a subject. It is understood that PRODH2 is expressed predominantly in the liver.

[0641] Inhibition may be assessed by a decrease in an absolute or relative level of one or more variables that are associated with PRODH2 expression compared with a control level. The control level may be any type of control level that is utilized in the art, e.g., a pre-dose baseline level, or a level determined from a similar subject, cell, or sample that is untreated or treated with a control (such as, e.g., buffer only control or inactive agent control).

[0642] In some embodiments of the methods of the invention, expression of a PRODH2 gene is inhibited by at least 50%, 55%, 60%, 65%, 70%, 75%, 80%, 85%, 90%, or 95%, or to below the level of detection of the assay. In some embodiments, expression of a PRODH2 gene is inhibited by at least 70%. It is further understood that inhibition of PRODH2 expression in certain tissues, e.g., in liver, without a significant inhibition of expression in other tissues, e.g., brain, may be desirable. In some embodiments, expression level is determined using the assay method provided in Example 2 with a 10 nM siRNA concentration in the appropriate species matched cell line.

[0643] In certain embodiments, inhibition of expression in vivo is determined by knockdown of the human gene in a rodent expressing the human gene, e.g., an AAV-infected mouse expressing the human target gene (i.e., PRODH2), e.g., when administered as a single dose, e.g., at 3 mg/kg at the nadir of RNA expression. Knockdown of expression of an endogenous gene in a model animal system can also be determined, e.g., after administration of a single dose at, e.g., 3 mg/kg at the nadir of RNA expression. Such systems are useful when the nucleic acid sequence of the human gene and the model animal gene are sufficiently close such that the human iRNA provides effective knockdown of the model animal gene. RNA expression in liver is determined using the PCR methods provided in Example 2.

[0644] Inhibition of the expression of a PRODH2 gene may be manifested by a reduction of the amount of mRNA expressed by a first cell or group of cells (such cells may be present, for example, in a sample derived from a subject) in which a PRODH2 gene is transcribed and which has or have been treated (e.g., by contacting the cell or cells with an iRNA of the invention, or by administering an iRNA of the invention to a subject in which the cells are or were present) such that the expression of a PRODH2 gene is inhibited, as compared to a second cell or group of cells substantially identical to the first cell or group of cells but which has not or have not been so treated (control cell(s) not treated with an iRNA or not treated with an iRNA targeted to the gene of interest). In some embodiments, the inhibition is assessed by the method provided in Example 2 using a 10 nM siRNA concentration in the species matched cell line and expressing the level of mRNA in treated cells as a percentage of the level of mRNA in control cells, using the following formula:

$$\frac{( mRNA in control cells ) - ( mRNA in treated cells )}{( mRNA in control cells )} 100 \%$$

[0645] In other embodiments, inhibition of the expression of a PRODH2 gene may be assessed in terms of a reduction of a parameter that is functionally linked to PRODH2 gene expression, e.g., PRODH2 protein level in blood or serum from a subject. PRODH2 gene silencing may be determined in any cell expressing PRODH2, either endogenous or heterologous from an expression construct, and by any assay known in the art.

[0646] Inhibition of the expression of a PRODH2 protein may be manifested by a reduction in the level of the PRODH2 protein that is expressed by a cell or group of cells or in a subject sample (e.g., the level of protein in a blood sample derived from a subject). As explained above, for the assessment of mRNA suppression, the inhibition of protein expression levels in a treated cell or group of cells may similarly be expressed as a percentage of the level of protein in a control cell or group of cells, or the change in the level of protein in a subject sample, e.g., blood or serum derived therefrom.

[0647] A control cell, a group of cells, or subject sample that may be used to assess the inhibition of the expression of a PRODH2 gene includes a cell, group of cells, or subject sample that has not yet been contacted with an RNAi agent of the invention. For example, the control cell, group of cells, or subject sample may be derived from an individual subject (e.g., a human or animal subject) prior to treatment of the subject with an RNAi agent or an appropriately matched population control.

[0648] The level of PRODH2 mRNA that is expressed by a cell or group of cells may be determined using any method known in the art for assessing mRNA expression. In one embodiment, the level of expression of PRODH2 in a sample is determined by detecting a transcribed polynucleotide, or portion thereof, e.g., mRNA of the PRODH2 gene. RNA may be extracted from cells using RNA extraction techniques including, for example, using acid phenol/guanidine isothiocyanate extraction (RNAzol B; Biogenesis), RNeasy™ RNA preparation kits (Qiagen®) or PAXgene™ (PreAnalytix™, Switzerland). Typical assay formats utilizing ribonucleic acid hybridization include nuclear run-on assays, RT-PCR, RNase protection assays, northern blotting, in situ hybridization, and microarray analysis.

[0649] In some embodiments, the level of expression of PRODH2 is determined using a nucleic acid probe. The term “probe”, as used herein, refers to any molecule that is capable of selectively binding to a specific PRODH2. Probes can be synthesized by one of skill in the art, or derived from appropriate biological preparations. Probes may be specifically designed to be labeled. Examples of molecules that can be utilized as probes include, but are not limited to, RNA, DNA, proteins, antibodies, and organic molecules.

[0650] Isolated mRNA can be used in hybridization or amplification assays that include, but are not limited to, Southern or northern analyses, polymerase chain reaction (PCR) analyses and probe arrays. One method for the determination of mRNA levels involves contacting the isolated mRNA with a nucleic acid molecule (probe) that can hybridize to PRODH2 mRNA. In one embodiment, the mRNA is immobilized on a solid surface and contacted with a probe, for example by running the isolated mRNA on an agarose gel and transferring the mRNA from the gel to a membrane, such as nitrocellulose. In an alternative embodiment, the probe(s) are immobilized on a solid surface and the mRNA is contacted with the probe(s), for example, in an Affymetrix® gene chip array. A skilled artisan can readily adapt known mRNA detection methods for use in determining the level of PRODH2 mRNA.

[0651] An alternative method for determining the level of expression of PRODH2 in a sample involves the process of nucleic acid amplification or reverse transcriptase (to prepare cDNA) of for example mRNA in the sample, e.g., by RT-PCR (the experimental embodiment set forth in Mullis, 1987, U.S. Pat. No. 4,683,202), ligase chain reaction (Barany (1991) Proc. Natd. Acad. Sci. USA 88:189-193), self sustained sequence replication (Guatelli et al. (1990) Proc. Natd. Acad. Sci. USA 87:1874-1878), transcriptional amplification system (Kwoh et al. (1989) Proc. Natd. Acad. Sci. USA 86:1173-1177), Q-Beta Replicase (Lizardi et al. (1988) Bio/Technology 6:1197), rolling circle replication (Lizardi et al., U.S. Pat. No. 5,854,033) or any other nucleic acid amplification method, followed by the detection of the amplified molecules using techniques well known to those of skill in the art. These detection schemes are especially useful for the detection of nucleic acid molecules if such molecules are present in very low numbers. In particular aspects of the invention, the level of expression of PRODH2 is determined by quantitative fluorogenic RT-PCR (i.e., the TaqMan™ System). In some embodiments, expression level is determined by the method provided in Example 2 using, e.g., a 10 nM siRNA concentration, in the species matched cell line.

[0652] The expression levels of PRODH2 mRNA may be monitored using a membrane blot (such as used in hybridization analysis such as northern, Southern, dot, and the like), or microwells, sample tubes, gels, beads or fibers (or any solid support comprising bound nucleic acids). See U.S. Pat. Nos. 5,770,722, 5,874,219, 5,744,305, 5,677,195 and 5,445,934, which are incorporated herein by reference. The determination of PRODH2 expression level may also comprise using nucleic acid probes in solution.

[0653] In some embodiments, the level of mRNA expression is assessed using branched DNA (bDNA) assays or real time PCR (qPCR). The use of these methods is described and exemplified in the Examples presented herein. In some embodiments, expression level is determined by the method provided in Example 2 using a 10 nM siRNA concentration in the species matched cell line.

[0654] The level of PRODH2 protein expression may be determined using any method known in the art for the measurement of protein levels. Such methods include, for example, electrophoresis, capillary electrophoresis, high performance liquid chromatography (HPLC), thin layer chromatography (TLC), hyperdiffusion chromatography, fluid or gel precipitin reactions, absorption spectroscopy, a colorimetric assays, spectrophotometric assays, flow cytometry, immunodiffusion (single or double), immunoelectrophoresis, western blotting, radioimmunoassay (RIA), enzyme-linked immunosorbent assays (ELISAs), immunofluorescent assays, electrochemiluminescence assays, and the like.

[0655] In some embodiments, the efficacy of the methods of the invention are assessed by a decrease in PRODH2 mRNA or protein level (e.g., in a liver biopsy).

[0656] In some embodiments of the methods of the invention, the iRNA is administered to a subject such that the iRNA is delivered to a specific site within the subject. The inhibition of expression of PRODH2 may be assessed using measurements of the level or change in the level of PRODH2 mRNA or PRODH2 protein in a sample derived from fluid or tissue from the specific site within the subject (e.g., liver or blood).

[0657] As used herein, the terms detecting or determining a level of an analyte are understood to mean performing the steps to determine if a material, e.g., protein, RNA, is present. As used herein, methods of detecting or determining include detection or determination of an analyte level that is below the level of detection for the method used.

### VII. Prophylactic and Treatment Methods of the Invention

[0658] The present invention also provides methods of using an iRNA of the invention or a composition containing an iRNA of the invention to inhibit expression of PRODH2, thereby preventing or treating a PRODH2-associated disorder, e.g., primary hyperoxaluria and/or kidney stone diseases. In the methods of the invention the cell may be contacted with the siRNA in vitro or in vivo, i.e., the cell may be within a subject.

[0659] A cell suitable for treatment using the methods of the invention may be any cell that expresses a PRODH2 gene, e.g., a liver cell. A cell suitable for use in the methods of the invention may be a mammalian cell, e.g., a primate cell (such as a human cell, including human cell in a chimeric non-human animal, or a non-human primate cell, e.g., a monkey cell or a chimpanzee cell), or a non-primate cell. In certain embodiments, the cell is a human cell, e.g., a human liver cell. In the methods of the invention, PRODH2 expression is inhibited in the cell by at least 50, 55, 60, 65, 70, 75, 80, 85, 90, or 95, or to a level below the level of detection of the assay.

[0660] The in vivo methods of the invention may include administering to a subject a composition containing an iRNA, where the iRNA includes a nucleotide sequence that is complementary to at least a part of an RNA transcript of the PRODH2 gene of the mammal to which the RNAi agent is to be administered. The composition can be administered by any means known in the art including, but not limited to oral, intraperitoneal, or parenteral routes, including intracranial (e.g., intraventricular, intraparenchymal, and intrathecal), intravenous, intramuscular, subcutaneous, transdermal, airway (aerosol), nasal, rectal, and topical (including buccal and sublingual) administration. In certain embodiments, the compositions are administered by intravenous infusion or injection. In certain embodiments, the compositions are administered by subcutaneous injection. In certain embodiments, the compositions are administered by intramuscular injection.

[0661] In one aspect, the present invention also provides methods for inhibiting the expression of a PRODH2 gene in a mammal. The methods include administering to the mammal a composition comprising a dsRNA that targets a PRODH2 gene in a cell of the mammal and maintaining the mammal for a time sufficient to obtain degradation of the mRNA transcript of the PRODH2 gene, thereby inhibiting expression of the PRODH2 gene in the cell. Reduction in gene expression can be assessed by any methods known in the art and by methods, e.g. qRT-PCR, described herein, e.g., in Example 2. Reduction in protein production can be assessed by any methods known it the art, e.g.

[0662] ELISA. In certain embodiments, a puncture liver biopsy sample serves as the tissue material for monitoring the reduction in the PRODH2 gene or protein expression. In other embodiments, a blood sample serves as the subject sample for monitoring the reduction in the PRODH2 protein expression.

[0663] The present invention further provides methods of treatment in a subject in need thereof, e.g., a subject diagnosed with a PRODH2-associated disorder, such as primary hyperoxaluria and/or kidney stone diseases.

[0664] The present invention further provides methods of prophylaxis in a subject in need thereof. The treatment methods of the invention include administering an iRNA of the invention to a subject, e.g., a subject that would benefit from a reduction of PRODH2 expression, in a prophylactically effective amount of a dsRNA targeting a PRODH2 gene or a pharmaceutical composition comprising a dsRNA targeting a PRODH2 gene.

[0665] In one aspect, the present invention provides methods of treating a subject having a disorder that would benefit from reduction in PRODH2 expression, e.g., a PRODH2-associated disease, such as primary hyperoxaluria and/or kidney stone diseases. Treatment of a subject that would benefit from a reduction and/or inhibition of PRODH2 gene expression includes therapeutic treatment (e.g., a subject is having elevated urinary oxalate, glyoxylate and/or glycolate levels) and prophylactic treatment (e.g., the subject is not having elevated urinary oxalate, glyoxylate and/or glycolate levels or a subject may be at risk of developing elevated urinary oxalate, glyoxylate and/or glycolate levels).

[0666] In some embodiments, the PRODH2-associated disease is primary hyperoxaluria.

[0667] In other embodiments, the PRODH2-associated disease is a kidney stone disease. In one embodiment, the kidney stone disease is a recurrent kidney stone disease. In another embodiment, the kidney stone disease is a non-recurrent kidney stone disease

[0668] In one embodiment, the kidney stone disease is a calcium oxalate kidney stone disease or a non-calcium oxalate kidney stone disease.

[0669] An iRNA of the invention may be administered as a “free iRNA.” A free iRNA is administered in the absence of a pharmaceutical composition. The naked iRNA may be in a suitable buffer solution. The buffer solution may comprise acetate, citrate, prolamine, carbonate, or phosphate, or any combination thereof. In one embodiment, the buffer solution is phosphate buffered saline (PBS). The pH and osmolarity of the buffer solution containing the iRNA can be adjusted such that it is suitable for administering to a subject.

[0670] Alternatively, an iRNA of the invention may be administered as a pharmaceutical composition, such as a dsRNA liposomal formulation.

[0671] Subjects that would benefit from an inhibition of PRODH2 gene expression are subjects susceptible to or diagnosed with a PRODH2-associated disorder, such as primary hyperoxaluria and/or kidney stone diseases. In one embodiment, the subject having a kidney stone disease has had a surgery to remove a kidney stone. In an embodiment, the method includes administering a composition featured herein such that expression of the target a PRODH2 gene is decreased, such as for about 1, 2, 3, 4, 5, 6, 1-6, 1-3, or 3-6 months per dose. In certain embodiments, the composition is administered once every 3-6 months.

[0672] In one embodiment, the iRNAs useful for the methods and compositions featured herein specifically target RNAs (primary or processed) of the target PRODH2 gene. Compositions and methods for inhibiting the expression of these genes using iRNAs can be prepared and performed as described herein.

[0673] Administration of the iRNA according to the methods of the invention may result prevention or treatment of a PRODH2-associated disorder, e.g., primary hyperoxaluria and/or kidney stone diseases.

[0674] Subjects can be administered a therapeutic amount of iRNA, such as about 0.01 mg/kg to about 200 mg/kg.

[0675] In one embodiment, the iRNA is administered subcutaneously, i.e., by subcutaneous injection. In another embodiment, the iRNA is administered intravenously, i.e., by intravenous injection. One or more injections may be used to deliver the desired dose of iRNA to a subject. The injections may be repeated over a period of time.

[0676] The administration may be repeated on a regular basis. In certain embodiments, after an initial treatment regimen, the treatments can be administered on a less frequent basis. A repeat-dose regimen may include administration of a therapeutic amount of iRNA on a regular basis, such as once per month to once a year. In certain embodiments, the iRNA is administered about once per month to about once every three months, or about once every three months to about once every six months.

[0677] The invention further provides methods and uses of an iRNA agent or a pharmaceutical composition thereof for treating a subject that would benefit from reduction and/or inhibition of PRODH2 gene expression, e.g., a subject having a PRODH2-associated disease, in combination with other pharmaceuticals and/or other therapeutic methods, e.g., with known pharmaceuticals and/or known therapeutic methods, such as, for example, those which are currently employed for treating these disorders.

[0678] Accordingly, in some aspects of the invention, the methods which include either a single iRNA agent of the invention, further include administering to the subject one or more additional therapeutic agents.

[0679] For example, in certain embodiments, an iRNA targeting PRODH2 is administered in combination with, e.g., an agent useful in treating a disorder associated with elevated levels of urinary oxalate, glyoxylate and/or glycolate levels, e.g., primary hyperoxaluria. For example, additional agents suitable for treating a subject that would benefit from reduction in PRODH2 expression may include pyridoxine, an ACE inhibitor (angiotensin converting enzyme inhibitors), e.g., benazepril (Lotensin); an angiotensin II receptor antagonist (ARB) (e.g., losartan potassium, such as Merck & Co.'s Cozaar®), e.g., Candesartan (Atacand); an HMG-CoA reductase inhibitor (e.g., a statin); dietary oxalate degrading compounds, e.g., oxalate decarboxylase (Oxazyme); calcium binding agents, e.g., sodium cellulose phosphate (Calcibind); diuretics, e.g., thiazide diuretics, such as hydrochlorothiazide (Microzide); phosphate binders, e.g., Sevelamer (Renagel); magnesium and Vitamin B6 supplements; potassium citrate; orthophosphates, bisphosphonates; oral phosphate and citrate solutions; high fluid intake, urinary tract endoscopy; extracorporeal shock wave lithotripsy; kidney dialysis; kidney stone removal (e.g., surgery); and kidney/liver transplant; or a combination of any of the foregoing.

[0680] The iRNA agent and an additional therapeutic agent and/or treatment may be administered at the same time and/or in the same combination, e.g., parenterally, or the additional therapeutic agent can be administered as part of a separate composition or at separate times and/or by another method known in the art or described herein.

### VIII. Kits

[0681] In certain aspects, the instant disclosure provides kits that include a suitable container containing a pharmaceutical formulation of a siRNA compound, e.g., a double-stranded siRNA compound, or siRNA compound, (e.g., a precursor, e.g., a larger siRNA compound which can be processed into a siRNA compound, or a DNA which encodes an siRNA compound, e.g., a double-stranded siRNA compound, or ssiRNA compound, or precursor thereof).

[0682] Such kits include one or more dsRNA agent(s) and instructions for use, e.g., instructions for administering a prophylactically or therapeutically effective amount of a dsRNA agent(s). The dsRNA agent may be in a vial or a pre-filled syringe. The kits may optionally further comprise means for administering the dsRNA agent (e.g., an injection device, such as a pre-filled syringe), or means for measuring the inhibition of PRODH2 (e.g., means for measuring the inhibition of PRODH2 mRNA, PRODH2 protein, and/or PRODH2 activity). Such means for measuring the inhibition of PRODH2 may comprise a means for obtaining a sample from a subject, such as, e.g., a plasma sample. The kits of the invention may optionally further comprise means for determining the therapeutically effective or prophylactically effective amount.

[0683] In certain embodiments the individual components of the pharmaceutical formulation may be provided in one container, e.g., a vial or a pre-filled syringe. Alternatively, it may be desirable to provide the components of the pharmaceutical formulation separately in two or more containers, e.g., one container for a siRNA compound preparation, and at least another for a carrier compound. The kit may be packaged in a number of different configurations such as one or more containers in a single box. The different components can be combined, e.g., according to instructions provided with the kit.

[0684] The components can be combined according to a method described herein, e.g., to prepare and administer a pharmaceutical composition. The kit can also include a delivery device.

[0685] This invention is further illustrated by the following examples which should not be construed as limiting. The entire contents of all references, patents and published patent applications cited throughout this application, as well as the informal Sequence Listing and Figures, are hereby incorporated herein by reference.

### EXAMPLES

### Example 1. iRNA Synthesis

### Source of Reagents

[0686] Where the source of a reagent is not specifically given herein, such reagent can be obtained from any supplier of reagents for molecular biology at a quality/purity standard for application in molecular biology.

siRNA Design

[0687] siRNAs targeting the human proline dehydrogenase 2 (PRODH2) gene (human: NCBI refseqID NM_021232.2, NCBI GeneID: 58510) were designed using custom R and Python scripts. The human NM_021232.2 REFSEQ mRNA, has a length of 1473 bases.

[0688] Detailed lists of the unmodified PRODH2 sense and antisense strand nucleotide sequences are shown in Table 2. Detailed lists of the modified PRODH2 sense and antisense strand nucleotide sequences are shown in Table 3.

[0689] It is to be understood that, throughout the application, a duplex name without a decimal is equivalent to a duplex name with a decimal which merely references the batch number of the duplex. For example, AD-959917 is equivalent to AD-959917.1.

siRNA Synthesis

[0690] siRNAs were designed, synthesized, and prepared using methods known in the art. Briefly, siRNA sequences were synthesized on a 1 μmol scale using a Mermade 192 synthesizer (BioAutomation) with phosphoramidite chemistry on solid supports. The solid support was controlled pore glass (500-1000 Å) loaded with a custom GalNAc ligand (3′-GalNAc conjugates), universal solid support (AM Chemicals), or the first nucleotide of interest. Ancillary synthesis reagents and standard 2-cyanoethyl phosphoramidite monomers (2′-deoxy-2′-fluoro, 2′-O-methyl, RNA, DNA) were obtained from Thermo-Fisher (Milwaukee, WI), Hongene (China), or Chemgenes (Wilmington, MA, USA). Additional phosphoramidite monomers were procured from commercial suppliers, prepared in-house, or procured using custom synthesis from various CMOs. Phosphoramidites were prepared at a concentration of 100 mM in either acetonitrile or 9:1 acetonitrile:DMF and were coupled using 5-Ethylthio-1H-tetrazole (ETT, 0.25 M in acetonitrile) with a reaction time of 400 s. Phosphorothioate linkages were generated using a 100 mM solution of 3-((Dimethylamino-methylidene)amino)-3H-1,2,4-dithiazole-3-thione (DDTT, obtained from Chemgenes (Wilmington, MA, USA)) in anhydrous acetonitrile/pyridine (9:1 v/v). Oxidation time was 5 minutes. All sequences were synthesized with final removal of the DMT group (“DMT-Off”).

[0691] Upon completion of the solid phase synthesis, solid-supported oligoribonucleotides were treated with 300 μL of Methylamine (40% aqueous) at room temperature in 96 well plates for approximately 2 hours to afford cleavage from the solid support and subsequent removal of all additional base-labile protecting groups. For sequences containing any natural ribonucleotide linkages (2′-OH) protected with a tert-butyl dimethyl silyl (TBDMS) group, a second deprotection step was performed using TEA.3HF (triethylamine trihydrofluoride). To each oligonucleotide solution in aqueous methylamine was added 200 μL of dimethyl sulfoxide (DMSO) and 300 μL TEA.3HF and the solution was incubated for approximately 30 mins at 60° C. After incubation, the plate was allowed to come to room temperature and crude oligonucleotides were precipitated by the addition of 1 mL of 9:1 acetontrile:ethanol or 1:1 ethanol:isopropanol. The plates were then centrifuged at 4° C. for 45 mins and the supernatant carefully decanted with the aid of a multichannel pipette. The oligonucleotide pellet was resuspended in 20 mM NaOAc and subsequently desalted using a HiTrap size exclusion column (5 mL, GE Healthcare) on an Agilent LC system equipped with an autosampler, UV detector, conductivity meter, and fraction collector. Desalted samples were collected in 96 well plates and then analyzed by LC-MS and UV spectrometry to confirm identity and quantify the amount of material, respectively.

[0692] Duplexing of single strands was performed on a Tecan liquid handling robot. Sense and antisense single strands were combined in an equimolar ratio to a final concentration of 10 μM in 1×PBS in 96 well plates, the plate sealed, incubated at 100° C. for 10 minutes, and subsequently allowed to return slowly to room temperature over a period of 2-3 hours. The concentration and identity of each duplex was confirmed and then subsequently utilized for in vitro screening assays.

### Example 2. In Vitro Screening Methods

### Cell Culture and Transfections

[0693] For transfections, Hepa1-6 cells (ATCC, Manassas, VA) were grown to near confluence at 37° C. in an atmosphere of 5% CO₂ in Eagle's Minimum Essential Medium (Gibco) supplemented with 10% FBS (ATCC) before being released from the plate by trypsinization. Transfection was carried out by adding 7.5 μl of Opti-MEM plus 0.1 μl of Lipofectamine RNAiMax per well (Invitrogen, Carlsbad CA. cat #13778-150) to 2.5 μl of each siRNA duplex to an individual well in a 96-well plate. The mixture was then incubated at room temperature for 15 minutes. Forty μl of complete growth media without antibiotic containing ˜2×10⁴ cells were then added to the siRNA mixture. Cells were incubated for 24 hours prior to RNA purification. Single dose experiments were performed at 10 nM final duplex concentration.

Total RNA Isolation Using DYNABEADS mRNA Isolation Kit (Invitrogen™, Part #: 610-12)

[0694] Cells were lysed in 75 μl of Lysis/Binding Buffer containing 3 μL of beads per well and mixed for 10 minutes on an electrostatic shaker. The washing steps were automated on a Biotek EL406, using a magnetic plate support. Beads were washed (in 90 L) once in Buffer A, once in Buffer B, and twice in Buffer E, with aspiration steps in between. Following a final aspiration, complete 10 μL RT mixture was added to each well, as described below. cDNA synthesis using ABI High capacity cDNA reverse transcription kit (Applied Biosystems, Foster City, CA, Cat #4368813) A master mix of 1 μl 10× Buffer, 0.4 μl 25×dNTPs, 1 μl Random primers, 0.5 μl Reverse Transcriptase, 0.5 μl RNase inhibitor and 6.6 μl of H₂O per reaction were added per well. Plates were sealed, agitated for 10 minutes on an electrostatic shaker, and then incubated at 37 degrees C. for 2 hours. Following this, the plates were agitated at 80 degrees C. for 8 minutes.

### Real Time PCR

[0695] Two microlitre (μl) of cDNA were added to a master mix containing 0.5 μl of human GAPDH TaqMan Probe (4326317E), 0.5 μl human PRODH2, 2 μl nuclease-free water and 5 μl Lightcycler 480 probe master mix (Roche Cat #04887301001) per well in a 384 well plates (Roche cat #04887301001). Real time PCR was done in a LightCycler480 Real Time PCR system (Roche).

[0696] To calculate relative fold change, data are analyzed using the ΔΔCt method and normalized to assays performed with cells transfected with 10 nM AD-1955, or mock transfected cells. IC₅₀s are calculated using a 4 parameter fit model using XLFit and normalized to cells transfected with AD-1955 or mock-transfected. The sense and antisense sequences of AD-1955 are:

sense:
(SEQ ID NO: 18)
cuuAcGcuGAGuAcuucGAdTsdT
and
antisense
(SEQ ID NO: 19)
UCGAAGuACUcAGCGuAAGdTsdT.

[0697] The results of the single dose screen of the dsRNA agents listed in Tables 2 and 3 in Hepa1-6 cells are shown in Table 4.

TABLE 1
Abbreviations of nucleotide monomers used in nucleic acid sequence representation. It will
be understood that these monomers, when present in an oligonucleotide, are mutually linked by 5′-3′-
phosphodiester bonds; and it is understood that when the nucleotide contains a 2′-fluoro modification,
then the fluoro replaces the hydroxy at that position in the parent nucleotide (i.e., it is a 2′-deoxy-2′-
fluoronucleotide).

| Abbrevia- | |
|---|---|
| tion | Nucleotide(s) |
| A | Adenosine-3′-phosphate |
| Ab | beta-L-adenosine-3′-phosphate |
| Abs | beta-L-adenosine-3′-phosphorothioate |
| Af | 2′-fluoroadenosine-3′-phosphate |
| Afs | 2′-fluoroadenosine-3′-phosphorothioate |
| As | adenosine-3′-phosphorothioate |
| C | cytidine-3′-phosphate |
| Cb | beta-L-cytidine-3′-phosphate |
| Cbs | beta-L-cytidine-3′-phosphorothioate |
| Cf | 2′-fluorocytidine-3′-phosphate |
| Cfs | 2′-fluorocytidine-3′-phosphorothioate |
| Cs | cytidine-3′-phosphorothioate |
| G | guanosine-3′-phosphate |
| Gb | beta-L-guanosine-3′-phosphate |
| Gbs | beta-L-guanosine-3′-phosphorothioate |
| Gf | 2′-fluoroguanosine-3′-phosphate |
| Gfs | 2′-fluoroguanosine-3′-phosphorothioate |
| Gs | guanosine-3′-phosphorothioate |
| T | 5′-methyluridine-3′-phosphate |
| Tf | 2′-fluoro-5-methyluridine-3'-phosphate |
| Tfs | 2′-fluoro-5-methyluridine-3'-phosphorothioate |
| Ts | 5-methyluridine-3′-phosphorothioate |
| U | Uridine-3'-phosphate |
| Uf | 2′-fluorouridine-3′-phosphate |
| Ufs | 2'-fluorouridine-3'-phosphorothioate |
| Us | uridine-3′-phosphorothioate |
| N | any nucleotide, modified or unmodified |
| a | 2′-O-methyladenosine-3′-phosphate |
| as | 2′-O-methyladenosine-3′-phosphorothioate |
| c | 2′-O-methylcytidine-3′-phosphate |
| cs | 2′-O-methylcytidine-3′-phosphorothioate |
| g | 2′-O-methylguanosine-3′-phosphate |
| gs | 2′-O-methylguanosine-3′-phosphorothioate |
| t | 2′-O-methyl-5-methyluridine-3′-phosphate |
| ts | 2′-O-methyl-5-methyluridine-3′-phosphorothioate |
| u | 2′-O-methyluridine-3′-phosphate |
| us | 2′-O-methyluridine-3′-phosphorothioate |
| s | phosphorothioate linkage |
| L10 | N-(cholesterylcarboxamidocaproyl)-4-hydroxyprolinol (Hyp-C6-Chol) |
| L96 | N-[tris(GalNAc-alkyl)-amidodecanoyl)]-4-hydroxyprolinol |
| | [chemical structure] |
| Y34 | 2-hydroxymethyl-tetrahydrofurane-4-methoxy-3-phosphate (abasic 2′-OMe |
| | furanose) |
| | [chemical structure] |
| Y44 | inverted abasic DNA (2-hydroxymethyl-tetrahydrofurane-5-phosphate) |
| | [chemical structure] |
| L10 | N-(cholesterylcarboxamidocaproyl)-4-hydroxyprolinol (Hyp-C6-Chol) |
| | [chemical structure] |
| (Agn) | Adenosine-glycol nucleic acid (GNA) S-Isomer |
| (Cgn) | Cytidine-glycol nucleic acid (GNA) S-Isomer |
| (Ggn) | Guanosine-glycol nucleic acid (GNA) S-Isomer |
| (Tgn) | Thymidine-glycol nucleic acid (GNA) S-Isomer |
| P | Phosphate |
| VP | Vinyl-phosphonate |
| dA | 2′-deoxyadenosine-3′-phosphate |
| dAs | 2′-deoxyadenosine-3′-phosphorothioate |
| dC | 2′-deoxycytidine-3′-phosphate |
| dCs | 2′-deoxycytidine-3′-phosphorothioate |
| dG | 2′-deoxyguanosine-3′-phosphate |
| dGs | 2′-deoxyguanosine-3′-phosphorothioate |
| dT | 2′-deoxythimidine-3′-phosphate |
| dTs | 2′-deoxythimidine-3′-phosphorothioate |
| dU | 2′-deoxyuridine |
| dUs | 2′-deoxyuridine-3′-phosphorothioate |
| (C2p) | cytidine-2′-phosphate |
| (G2p) | guanosine-2′-phosphate |
| (U2p) | uridine-2′-phosphate |
| (A2p) | adenosine-2′-phosphate |
| (Chd) | 2′-O-hexadecyl-cytidine-3′-phosphate |
| (Ahd) | 2′-O-hexadecyl-adenosine-3′-phosphate |
| (Ghd) | 2′-O-hexadecyl-guanosine-3′-phosphate |
| (Uhd) | 2′-O-hexadecyl-uridine-3′-phosphate |
| S | phosphorothioate |

TABLE 2
Unmodified Sense and Antisense Strand Sequences of PRODH2 dsRNA Agents

| | | SEQ | Range | | SEQ | Range |
|---|---|---|---|---|---|---|
| Duplex | Sense Sequence | ID | in NM_ | Antisense Sequence | ID | in NM_ |
| Name | 5′ to 3′ | NO: | 021232.2 | 5′ to 3′ | NO: | 021232.2 |
| AD-1553630 | AGAACCUUCCCUGGUGUGGAU | 20 | 3-23 | AUCCACACCAGGGAAGGUUCUCU | 155 | 1-23 |
| AD-1553635 | CUUCCCUGGUGUGGAGGCAGU | 21 | 8-28 | ACUGCCUCCACACCAGGGAAGGU | 156 | 86-28 |
| AD-1553662 | CAGGAUGCUCCGGACCUGUUU | 22 | 37-57 | AAACAGGUCCGGAGCAUCCUGGG | 157 | 35-57 |
| AD-1553667 | UGCUCCGGACCUGUUACGUGU | 23 | 42-62 | ACACGUAACAGGUCCGGAGCAUC | 158 | 40-62 |
| AD-1553674 | GACCUGUUACGUGCUCUGUUU | 24 | 49-69 | AAACAGAGCACGUAACAGGUCCG | 159 | 47-69 |
| AD-1553681 | UACGUGCUCUGUUCCCAAGCU | 25 | 56-76 | AGCUUGGGAACAGAGCACGUAAC | 160 | 54-76 |
| AD-1553686 | GCUCUGUUCCCAAGCUGGUCU | 26 | 61-81 | AGACCAGCUUGGGAACAGAGCAC | 161 | 59-81 |
| AD-1553691 | CUGGCAGUCCCUGAGCUUUGU | 27 | 94-114 | ACAAAGCUCAGGGACUGCCAGCC | 162 | 92-114 |
| AD-1553697 | GUCCCUGAGCUUUGAUGGCGU | 28 | 100-120 | ACGCCAUCAAAGCUCAGGGACUG | 163 | 98-120 |
| AD-1553701 | GCCUUCCACCUUAAGGGCACU | 29 | 122-142 | AGUGCCCUUAAGGUGGAAGGCCC | 164 | 120-142 |
| AD-1553707 | CACCUUAAGGGCACAGGAGAU | 30 | 128-148 | AUCUCCUGUGCCCUUAAGGUGGA | 165 | 126-148 |
| AD-1553715 | GGGCACAGGAGAGCUGACACU | 31 | 136-156 | AGUGUCAGCUCUCCUGUGCCCUU | 166 | 134-156 |
| AD-1553722 | GGAGAGCUGACACGGGCCUUU | 32 | 143-163 | AAAGGCCCGUGUCAGCUCUCCUG | 167 | 141-163 |
| AD-1553730 | GACACGGGCCUUGCUGGUUCU | 33 | 151-171 | AGAACCAGCAAGGCCCGUGUCAG | 168 | 149-171 |
| AD-1553739 | CUUGCUGGUUCUCCGGCUGUU | 34 | 160-180 | AACAGCCGGAGAACCAGCAAGGC | 169 | 158-180 |
| AD-1553745 | GGUUCUCCGGCUGUGUGCCUU | 35 | 166-186 | AAGGCACACAGCCGGAGAACCAG | 170 | 164-186 |
| AD-1553751 | CUCGUCACUCACGGGCUGUUU | 36 | 194-214 | AAACAGCCCGUGAGUGACGAGUG | 171 | 192-214 |
| AD-1553758 | CUCACGGGCUGUUGCUCCAGU | 37 | 201-221 | ACUGGAGCAACAGCCCGUGAGUG | 172 | 199-221 |
| AD-1553769 | UUGCUCCAGGCCUGGUCUCGU | 38 | 212-232 | ACGAGACCAGGCCUGGAGCAACA | 173 | 210-232 |
| AD-1553794 | GGCUCUCAGGCGCAUUUCUCU | 39 | 249-269 | AGAGAAAUGCGCCUGAGAGCCGG | 174 | 247-269 |
| AD-1553799 | UCAGGCGCAUUUCUCCGAGCU | 40 | 254-274 | AGCUCGGAGAAAUGCGCCUGAGA | 175 | 252-274 |
| AD-1553804 | CGCAUUUCUCCGAGCAUCCGU | 41 | 259-279 | ACGGAUGCUCGGAGAAAUGCGCC | 176 | 257-279 |
| AD-1553809 | UUCUCCGAGCAUCCGUCUAUU | 42 | 264-284 | AAUAGACGGAUGCUCGGAGAAAU | 177 | 262-284 |
| AD-1553815 | GAGCAUCCGUCUAUGGGCAGU | 43 | 270-290 | ACUGCCCAUAGACGGAUGCUCGG | 178 | 268-290 |
| AD-1553820 | UCCGUCUAUGGGCAGUUUGUU | 44 | 275-295 | AACAAACUGCCCAUAGACGGAUG | 179 | 273-295 |
| AD-1553826 | UAUGGGCAGUUUGUGGCUGGU | 45 | 281-301 | ACCAGCCACAAACUGCCCAUAGA | 180 | 279-301 |
| AD-1553832 | CAGUUUGUGGCUGGUGAGACU | 46 | 287-307 | AGUCUCACCAGCCACAAACUGCC | 181 | 285-307 |
| AD-1553839 | UGGCUGGUGAGACAGCAGAGU | 47 | 294-314 | ACUCUGCUGUCUCACCAGCCACA | 182 | 292-314 |
| AD-1553845 | GUGAGACAGCAGAGGAGGUGU | 48 | 300-320 | ACACCUCCUCUGCUGUCUCACCA | 183 | 298-320 |
| AD-1553852 | AGCAGAGGAGGUGAAGGGCUU | 49 | 307-327 | AAGCCCUUCACCUCCUCUGCUGU | 184 | 305-327 |
| AD-1553859 | GAGGUGAAGGGCUGCGUGCAU | 50 | 314-334 | AUGCACGCAGCCCUUCACCUCCU | 185 | 312-334 |
| AD-1553865 | AAGGGCUGCGUGCAGCAGCUU | 51 | 320-340 | AAGCUGCUGCACGCAGCCCUUCA | 186 | 318-340 |
| AD-1553907 | UGCUGGCAGUGCCCACUGAGU | 52 | 363-383 | ACUCAGUGGGCACUGCCAGCAGU | 187 | 361-383 |
| AD-1553912 | GCAGUGCCCACUGAGGAGGAU | 53 | 368-388 | AUCCUCCUCAGUGGGCACUGCCA | 188 | 366-388 |
| AD-1553922 | CUGAGGAGGAGCCGGACUCUU | 54 | 378-398 | AAGAGUCCGGCUCCUCCUCAGUG | 189 | 376-398 |
| AD-1553930 | GAGCCGGACUCUGCUGCCAAU | 55 | 386-406 | AUUGGCAGCAGAGUCCGGCUCCU | 190 | 384-406 |
| AD-1553937 | ACUCUGCUGCCAAGAGUGGUU | 56 | 393-413 | AACCACUCUUGGCAGCAGAGUCC | 191 | 391-413 |
| AD-1553942 | GCUGCCAAGAGUGGUGAGGCU | 57 | 398-418 | AGCCUCACCACUCUUGGCAGCAG | 192 | 396-418 |
| AD-1553951 | AGUGGUGAGGCGUGGUAUGAU | 58 | 407-427 | AUCAUACCACGCCUCACCACUCU | 193 | 405-427 |
| AD-1553957 | AACCUCGGUGCUAUGCUGCGU | 59 | 431-451 | ACGCAGCAUAGCACCGAGGUUCC | 194 | 429-451 |
| AD-1553962 | CGGUGCUAUGCUGCGGUGUGU | 60 | 436-456 | ACACACCGCAGCAUAGCACCGAG | 195 | 434-456 |
| AD-1553967 | CUAUGCUGCGGUGUGUGGACU | 61 | 441-461 | AGUCCACACACCGCAGCAUAGCA | 196 | 439-461 |
| AD-1553975 | CGGUGUGUGGACCUGUCACGU | 62 | 449-469 | ACGUGACAGGUCCACACACCGCA | 197 | 447-469 |
| AD-1553988 | GGCCAGCCUCAUGCAGCUGAU | 63 | 499-519 | AUCAGCUGCAUGAGGCUGGCCUC | 198 | 497-519 |
| AD-1553993 | GCCUCAUGCAGCUGAAGGUGU | 64 | 504-524 | ACACCUUCAGCUGCAUGAGGCUG | 199 | 502-524 |
| AD-1553998 | AUGCAGCUGAAGGUGACGGCU | 65 | 509-529 | AGCCGUCACCUUCAGCUGCAUGA | 200 | 507-529 |
| AD-1554003 | GCUGAAGGUGACGGCGCUGAU | 66 | 514-534 | AUCAGCGCCGUCACCUUCAGCUG | 201 | 512-534 |
| AD-1554009 | GGUGACGGCGCUGACCAGUAU | 67 | 520-540 | AUACUGGUCAGCGCCGUCACCUU | 202 | 518-540 |
| AD-1554018 | GCUGACCAGUACUCGGCUCUU | 68 | 529-549 | AAGAGCCGAGUACUGGUCAGCGC | 203 | 527-549 |
| AD-1554025 | AGUACUCGGCUCUGUAAGGAU | 69 | 536-556 | AUCCUUACAGAGCCGAGUACUGG | 204 | 534-556 |
| AD-1554030 | UCGGCUCUGUAAGGAGCUAGU | 70 | 541-561 | ACUAGCUCCUUACAGAGCCGAGU | 205 | 539-561 |
| AD-1554036 | CUGUAAGGAGCUAGCCUCGUU | 71 | 547-567 | AACGAGGCUAGCUCCUUACAGAG | 206 | 545-567 |
| AD-1554041 | AGGAGCUAGCCUCGUGGGUCU | 72 | 552-572 | AGACCCACGAGGCUAGCUCCUUA | 207 | 550-572 |
| AD-1554048 | AGCCUCGUGGGUCAGAAGGCU | 73 | 559-579 | AGCCUUCUGACCCACGAGGCUAG | 208 | 557-579 |
| AD-1554054 | GUGGGUCAGAAGGCCAGGAGU | 74 | 565-585 | ACUCCUGGCCUUCUGACCCACGA | 209 | 563-585 |
| AD-1554065 | GGCCAGGAGCCUCCUUGGAGU | 75 | 576-596 | ACUCCAAGGAGGCUCCUGGCCUU | 210 | 574-596 |
| AD-1554070 | GGAGCCUCCUUGGAGCUGAGU | 76 | 581-601 | ACUCAGCUCCAAGGAGGCUCCUG | 211 | 579-601 |
| AD-1554074 | GAGAGGCUGGCUGAAGCUAUU | 77 | 605-625 | AAUAGCUUCAGCCAGCCUCUCGG | 212 | 603-625 |
| AD-1554082 | GGCUGAAGCUAUGGACUCUGU | 78 | 613-633 | ACAGAGUCCAUAGCUUCAGCCAG | 213 | 611-633 |
| AD-1554089 | GCUAUGGACUCUGGGCAGAAU | 79 | 620-640 | AUUCUGCCCAGAGUCCAUAGCUU | 214 | 618-640 |
| AD-1554097 | CUCUGGGCAGAACCUCCAGGU | 80 | 628-648 | ACCUGGAGGUUCUGCCCAGAGUC | 215 | 626-648 |
| AD-1554106 | GAACCUCCAGGUCUCCUGCCU | 81 | 637-657 | AGGCAGGAGACCUGGAGGUUCUG | 216 | 635-657 |
| AD-1554111 | UCCAGGUCUCCUGCCUCAAUU | 82 | 642-662 | AAUUGAGGCAGGAGACCUGGAGG | 217 | 640-662 |
| AD-1554119 | UCCUGCCUCAAUGCUGAGCAU | 83 | 650-670 | AUGCUCAGCAUUGAGGCAGGAGA | 218 | 648-670 |
| AD-1554126 | UCAAUGCUGAGCAGAACCAGU | 84 | 657-677 | ACUGGUUCUGCUCAGCAUUGAGG | 219 | 655-677 |
| AD-1554131 | GCUGAGCAGAACCAGCACCUU | 85 | 662-682 | AAGGUGCUGGUUCUGCUCAGCAU | 220 | 660-682 |
| AD-1554156 | GCAUCGGGUGGCACAGUAUGU | 86 | 703-723 | ACAUACUGUGCCACCCGAUGCAG | 221 | 701-723 |
| AD-1554186 | CUCCUGGUGGAUGCGGAGUAU | 87 | 743-763 | AUACUCCGCAUCCACCAGGAGCC | 222 | 741-763 |
| AD-1554193 | UGGAUGCGGAGUACACCUCAU | 88 | 750-770 | AUGAGGUGUACUCCGCAUCCACC | 223 | 748-770 |
| AD-1554198 | GCGGAGUACACCUCACUGAAU | 89 | 755-775 | AUUCAGUGAGGUGUACUCCGCAU | 224 | 753-775 |
| AD-1554203 | GUACACCUCACUGAACCCUGU | 90 | 760-780 | ACAGGGUUCAGUGAGGUGUACUC | 225 | 758-780 |
| AD-1554210 | UCACUGAACCCUGCGCUCUCU | 91 | 767-787 | AGAGAGCGCAGGGUUCAGUGAGG | 226 | 765-787 |
| AD-1554216 | AACCCUGCGCUCUCGCUGCUU | 92 | 773-793 | AAGCAGCGAGAGCGCAGGGUUCA | 227 | 771-793 |
| AD-1554263 | CCCUGGGUGUGGAACACCUAU | 93 | 839-859 | AUAGGUGUUCCACACCCAGGGCC | 228 | 837-859 |
| AD-1554268 | GGUGUGGAACACCUACCAGGU | 94 | 844-864 | ACCUGGUAGGUGUUCCACACCCA | 229 | 842-864 |
| AD-1554278 | ACCUACCAGGCCUGUCUAAAU | 95 | 854-874 | AUUUAGACAGGCCUGGUAGGUGU | 230 | 852-874 |
| AD-1554287 | GCCUGUCUAAAGGACACAUUU | 96 | 863-883 | AAAUGUGUCCUUUAGACAGGCCU | 231 | 861-883 |
| AD-1554292 | UCUAAAGGACACAUUCGAGCU | 97 | 868-888 | AGCUCGAAUGUGUCCUUUAGACA | 232 | 866-888 |
| AD-1554298 | GGACACAUUCGAGCGGCUGGU | 98 | 874-894 | ACCAGCCGCUCGAAUGUGUCCUU | 233 | 872-894 |
| AD-1554317 | GGCCUUCGGAGUGAAGCUGGU | 99 | 928-948 | ACCAGCUUCACUCCGAAGGCCAG | 234 | 926-948 |
| AD-1554323 | CGGAGUGAAGCUGGUACGAGU | 100 | 934-954 | ACUCGUACCAGCUUCACUCCGAA | 235 | 932-954 |
| AD-1554328 | UGAAGCUGGUACGAGGUGCAU | 101 | 939-959 | AUGCACCUCGUACCAGCUUCACU | 236 | 937-959 |
| AD-1554333 | CUGGUACGAGGUGCAUAUCUU | 102 | 944-964 | AAGAUAUGCACCUCGUACCAGCU | 237 | 942-964 |
| AD-1554340 | GAGGUGCAUAUCUGGACAAGU | 103 | 951-971 | ACUUGUCCAGAUAUGCACCUCGU | 238 | 949-971 |
| AD-1554346 | CAUAUCUGGACAAGGAGAGAU | 104 | 957-977 | AUCUCUCCUUGUCCAGAUAUGCA | 239 | 955-977 |
| AD-1554351 | CUGGACAAGGAGAGAGCGGUU | 105 | 962-982 | AACCGCUCUCUCCUUGUCCAGAU | 240 | 960-982 |
| AD-1554371 | GCCCAGCUCCAUGGGAUGGAU | 106 | 983-1003 | AUCCAUCCCAUGGAGCUGGGCCA | 241 | 981-1003 |
| AD-1554376 | GCUCCAUGGGAUGGAAGACCU | 107 | 988-1008 | AGGUCUUCCAUCCCAUGGAGCUG | 242 | 986-1008 |
| AD-1554379 | CUCAGCCUGACUAUGAGGCCU | 108 | 1011-1031 | AGGCCUCAUAGUCAGGCUGAGUG | 243 | 1009-1031 |
| AD-1554387 | GACUAUGAGGCCACCAGUCAU | 109 | 1019-1039 | AUGACUGGUGGCCUCAUAGUCAG | 244 | 1017-1039 |
| AD-1554393 | GAGGCCACCAGUCAGAGUUAU | 110 | 1025-1045 | AUAACUCUGACUGGUGGCCUCAU | 245 | 1023-1045 |
| AD-1554399 | ACCAGUCAGAGUUACAGCCGU | 111 | 1031-1051 | ACGGCUGUAACUCUGACUGGUGG | 246 | 1029-1051 |
| AD-1554404 | UCAGAGUUACAGCCGCUGCCU | 112 | 1036-1056 | AGGCAGCGGCUGUAACUCUGACU | 247 | 1034-1056 |
| AD-1554413 | CAGCCGCUGCCUGGAACUGAU | 113 | 1045-1065 | AUCAGUUCCAGGCAGCGGCUGUA | 248 | 1043-1065 |
| AD-1554418 | GCUGCCUGGAACUGAUGCUGU | 114 | 1050-1070 | ACAGCAUCAGUUCCAGGCAGCGG | 249 | 1048-1070 |
| AD-1554425 | GGAACUGAUGCUGACGCACGU | 115 | 1057-1077 | ACGUGCGUCAGCAUCAGUUCCAG | 250 | 1055-1077 |
| AD-1554430 | UGAUGCUGACGCACGUGGCCU | 116 | 1062-1082 | AGGCCACGUGCGUCAGCAUCAGU | 251 | 1060-1082 |
| AD-1554433 | CAUGUGCCACCUCAUGGUGGU | 117 | 1093-1113 | ACCACCAUGAGGUGGCACAUGGG | 252 | 1091-1113 |
| AD-1554443 | CUCAUGGUGGCUUCCCACAAU | 118 | 1103-1123 | AUUGUGGGAAGCCACCAUGAGGU | 253 | 1101-1123 |
| AD-1554451 | GGCUUCCCACAAUGAGGAAUU | 119 | 1111-1131 | AAUUCCUCAUUGUGGGAAGCCAC | 254 | 1109-1131 |
| AD-1554456 | CCCACAAUGAGGAAUCUGUUU | 120 | 1116-1136 | AAACAGAUUCCUCAUUGUGGGAA | 255 | 1114-1136 |
| AD-1554461 | AAUGAGGAAUCUGUUCGCCAU | 121 | 1121-1141 | AUGGCGAACAGAUUCCUCAUUGU | 256 | 1119-1141 |
| AD-1554470 | UCUGUUCGCCAGGCAACCAAU | 122 | 1130-1150 | AUUGGUUGCCUGGCGAACAGAUU | 257 | 1128-1150 |
| AD-1554475 | UCGCCAGGCAACCAAGCGCAU | 123 | 1135-1155 | AUGCGCUUGGUUGCCUGGCGAAC | 258 | 1133-1155 |
| AD-1554482 | GCAACCAAGCGCAUGUGGGAU | 124 | 1142-1162 | AUCCCACAUGCGCUUGGUUGCCU | 259 | 1140-1162 |
| AD-1554487 | CAAGCGCAUGUGGGAGCUGGU | 125 | 1147-1167 | ACCAGCUCCCACAUGCGCUUGGU | 260 | 1145-1167 |
| AD-1554492 | GCAUGUGGGAGCUGGGCAUUU | 126 | 1152-1172 | AAAUGCCCAGCUCCCACAUGCGC | 261 | 1150-1172 |
| AD-1554497 | UGGGAGCUGGGCAUUCCUCUU | 127 | 1157-1177 | AAGAGGAAUGCCCAGCUCCCACA | 262 | 1155-1177 |
| AD-1554505 | GGGCAUUCCUCUGGAUGGGAU | 128 | 1165-1185 | AUCCCAUCCAGAGGAAUGCCCAG | 263 | 1163-1185 |
| AD-1554510 | UUCCUCUGGAUGGGACUGUCU | 129 | 1170-1190 | AGACAGUCCCAUCCAGAGGAAUG | 264 | 1168-1190 |
| AD-1554515 | CUGGAUGGGACUGUCUGUUUU | 130 | 1175-1195 | AAAACAGACAGUCCCAUCCAGAG | 265 | 1173-1195 |
| AD-1554520 | UGGGACUGUCUGUUUCGGACU | 131 | 1180-1200 | AGUCCGAAACAGACAGUCCCAUC | 266 | 1178-1200 |
| AD-1554525 | CUGUCUGUUUCGGACAACUUU | 132 | 1185-1205 | AAAGUUGUCCGAAACAGACAGUC | 267 | 1183-1205 |
| AD-1554533 | UUCGGACAACUUCUGGGCAUU | 133 | 1193-1213 | AAUGCCCAGAAGUUGUCCGAAAC | 268 | 1191-1213 |
| AD-1554542 | CUUCUGGGCAUGUGUGACCAU | 134 | 1202-1222 | AUGGUCACACAUGCCCAGAAGUU | 269 | 1200-1222 |
| AD-1554551 | AUGUGUGACCACGUCUCUCUU | 135 | 1211-1231 | AAGAGAGACGUGGUCACACAUGC | 270 | 1209-1231 |
| AD-1554557 | GACCACGUCUCUCUAGCACUU | 136 | 1217-1237 | AAGUGCUAGAGAGACGUGGUCAC | 271 | 1215-1237 |
| AD-1554562 | GCAGGCCGGCUAUGUAGUGUU | 137 | 1240-1260 | AACACUACAUAGCCGGCCUGCCC | 272 | 1238-1260 |
| AD-1554567 | CCGGCUAUGUAGUGUAUAAGU | 138 | 1245-1265 | ACUUAUACACUACAUAGCCGGCC | 273 | 1243-1265 |
| AD-1554573 | AUGUAGUGUAUAAGUCCAUUU | 139 | 1251-1271 | AAAUGGACUUAUACACUACAUAG | 274 | 1249-1271 |
| AD-1554578 | GUGUAUAAGUCCAUUCCCUAU | 140 | 1256-1276 | AUAGGGAAUGGACUUAUACACUA | 275 | 1254-1276 |
| AD-1554584 | AAGUCCAUUCCCUAUGGCUCU | 141 | 1262-1282 | AGAGCCAUAGGGAAUGGACUUAU | 276 | 1260-1282 |
| AD-1554591 | UUCCCUAUGGCUCCUUGGAGU | 142 | 1269-1289 | ACUCCAAGGAGCCAUAGGGAAUG | 277 | 1267-1289 |
| AD-1554599 | GGCUCCUUGGAGGAGGUAAUU | 143 | 1277-1297 | AAUUACCUCCUCCAAGGAGCCAU | 278 | 1275-1297 |
| AD-1554609 | AUCCGGAGGGCCCAGGAGAAU | 144 | 1307-1327 | AUUCUCCUGGGCCCUCCGGAUCA | 279 | 1305-1327 |
| AD-1554626 | GAACCGGAGCGUGCUUCAGGU | 145 | 1324-1344 | ACCUGAAGCACGCUCCGGUUCUC | 280 | 1322-1344 |
| AD-1554642 | CAGGGUGCCCGCAGGGAACAU | 146 | 1340-1360 | AUGUUCCCUGCGGGCACCCUGAA | 281 | 1338-1360 |
| AD-1554653 | CAGGGAACAGGAGCUGCUCAU | 147 | 1351-1371 | AUGAGCAGCUCCUGUUCCCUGCG | 282 | 1349-1371 |
| AD-1554658 | AACAGGAGCUGCUCAGCCAAU | 148 | 1356-1376 | AUUGGCUGAGCAGCUCCUGUUCC | 283 | 1354-1376 |
| AD-1554663 | GAGCUGCUCAGCCAAGAACUU | 149 | 1361-1381 | AAGUUCUUGGCUGAGCAGCUCCU | 284 | 1359-1381 |
| AD-1554668 | GCUCAGCCAAGAACUGUGGCU | 150 | 1366-1386 | AGCCACAGUUCUUGGCUGAGCAG | 285 | 1364-1386 |
| AD-1554690 | UGCCAGGAUGCCGAAGGAUAU | 151 | 1395-1415 | AUAUCCUUCGGCAUCCUGGCAGC | 286 | 1393-1415 |
| AD-1554696 | UCAUGUGGUCAAUAAAAGUCU | 152 | 1438-1458 | AGACUUUUAUUGACCACAUGACC | 287 | 1436-1458 |
| AD-1554704 | UCAAUAAAAGUCCUUAGGUGU | 153 | 1446-1466 | ACACCUAAGGACUUUUAUUGACC | 288 | 1444-1466 |
| AD-1554709 | AAAAGUCCUUAGGUGCUGCCU | 154 | 1451-1471 | AGGCAGCACCUAAGGACUUUUAU | 289 | 1449-1471 |

TABLE 3
Modified Sense and Antisense Strand Sequences of PRODH2 dsRNA Agents

| | | SEQ ID | | SEQ ID | | SEQ ID |
|---|---|---|---|---|---|---|
| Duplex Name | Sense Sequence 5′ to 3′ | NO: | Anti sense Sequence 5′ to 3′ | NO: | mRNA target sequence | NO: |
| AD-1553630 | asgsaaccUfuCfCfCfugguguggauL96 | 290 | asUfsccaCfaCfCfagggAfaGfguucuscsu | 425 | AGAGAACCUUCCCUGGUGUGGAG | 560 |
| AD-1553635 | csusucccUfgGfUfGfuggaggcaguL96 | 291 | asCfsugcCfuCfCfacacCfaGfggaagsgsu | 426 | ACCUUCCCUGGUGUGGAGGCAGC | 561 |
| AD-1553662 | csasggauGfcUfCfCfggaccuguuuL96 | 292 | asAfsacaGfgUfCfcggaGfcAfuccugsgsg | 427 | CCCAGGAUGCUCCGGACCUGUUA | 562 |
| AD-1553667 | usgscuccGfgAfCfCfuguuacguguL96 | 293 | asCfsacgUfaAfCfagguCfcGfgagcasusc | 428 | GAUGCUCCGGACCUGUUACGUGC | 563 |
| AD-1553674 | gsasccugUfuAfCfGfugcucuguuuL96 | 294 | asAfsacaGfaGfCfacguAfaCfaggucscsg | 429 | CGGACCUGUUACGUGCUCUGUUC | 564 |
| AD-1553681 | usascgugCfuCfUfGfuucccaagcuL96 | 295 | asGfscuuGfgGfAfacagAfgCfacguasasc | 430 | GUUACGUGCUCUGUUCCCAAGCU | 565 |
| AD-1553686 | gscsucugUfuCfCfCfaagcuggucuL96 | 296 | asGfsaccAfgCfUfugggAfaCfagagcsasc | 431 | GUGCUCUGUUCCCAAGCUGGUCC | 566 |
| AD-1553691 | csusggcaGfuCfCfCfugagcuuuguL96 | 297 | asCfsaaaGfcUfCfagggAfcUfgccagscsc | 432 | GGCUGGCAGUCCCUGAGCUUUGA | 567 |
| AD-1553697 | gsuscccuGfaGfCfUfuugauggcguL96 | 298 | asCfsgccAfuCfAfaagcUfcAfgggacsusg | 433 | CAGUCCCUGAGCUUUGAUGGCGG | 568 |
| AD-1553701 | gscscuucCfaCfCfUfuaagggcacuL96 | 299 | asGfsugcCfcUfUfaaggUfgGfaaggcscsc | 434 | GGGCCUUCCACCUUAAGGGCACA | 569 |
| AD-1553707 | csasccuuAfaGfGfGfcacaggagauL96 | 300 | asUfscucCfuGfUfgcccUfuAfaggugsgsa | 435 | UCCACCUUAAGGGCACAGGAGAG | 570 |
| AD-1553715 | gsgsgcacAfgGfAfGfagcugacacuL96 | 301 | asGfsuguCfaGfCfucucCfuGfugcccsusu | 436 | AAGGGCACAGGAGAGCUGACACG | 571 |
| AD-1553722 | gsgsagagCfuGfAfCfacgggccuuuL96 | 302 | asAfsaggCfcCfGfugucAfgCfucuccsusg | 437 | CAGGAGAGCUGACACGGGCCUUG | 572 |
| AD-1553730 | gsascacgGfgCfCfUfugcugguucuL96 | 303 | asGfsaacCfaGfCfaaggCfcCfgugucsasg | 438 | CUGACACGGGCCUUGCUGGUUCU | 573 |
| AD-1553739 | csusugcuGfgUfUfCfuccggcuguuL96 | 304 | asAfscagCfcGfGfagaaCfcAfgcaagsgsc | 439 | GCCUUGCUGGUUCUCCGGCUGUG | 574 |
| AD-1553745 | gsgsuucuCfcGfGfCfugugugccuuL96 | 305 | asAfsggcAfcAfCfagccGfgAfgaaccsasg | 440 | CUGGUUCUCCGGCUGUGUGCCUG | 575 |
| AD-1553751 | csuscgucAfcUfCfAfcgggcuguuuL96 | 306 | asAfsacaGfcCfCfgugaGfuGfacgagsusg | 441 | CACUCGUCACUCACGGGCUGUUG | 576 |
| AD-1553758 | csuscacgGfgCfUfGfuugcuccaguL96 | 307 | asCfsuggAfgCfAfacagCfcCfgugagsusg | 442 | CACUCACGGGCUGUUGCUCCAGG | 577 |
| AD-1553769 | ususgcucCfaGfGfCfcuggucucguL96 | 308 | asCfsgagAfcCfAfggccUfgGfagcaascsa | 443 | UGUUGCUCCAGGCCUGGUCUCGG | 578 |
| AD-1553794 | gsgscucuCfaGfGfCfgcauuucucuL96 | 309 | asGfsagaAfaUfGfcgccUfgAfgagccsgsg | 444 | CCGGCUCUCAGGCGCAUUUCUCC | 579 |
| AD-1553799 | uscsaggcGfcAfUfUfucuccgagcuL96 | 310 | asGfscucGfgAfGfaaauGfcGfccugasgsa | 445 | UCUCAGGCGCAUUUCUCCGAGCA | 580 |
| AD-1553804 | csgscauuUfcUfCfCfgagcauccguL96 | 311 | asCfsggaUfgCfUfcggaGfaAfaugcgscsc | 446 | GGCGCAUUUCUCCGAGCAUCCGU | 581 |
| AD-1553809 | ususcuccGfaGfCfAfuccgucuauuL96 | 312 | asAfsuagAfcGfGfaugcUfcGfgagaasasu | 447 | AUUUCUCCGAGCAUCCGUCUAUG | 582 |
| AD-1553815 | gsasgcauCfcGfUfCfuaugggcaguL96 | 313 | asCfsugcCfcAfUfagacGfgAfugcucsgsg | 448 | CCGAGCAUCCGUCUAUGGGCAGU | 583 |
| AD-1553820 | uscscgucUfaUfGfGfgcaguuuguuL96 | 314 | asAfscaaAfcUfGfcccaUfaGfacggasusg | 449 | CAUCCGUCUAUGGGCAGUUUGUG | 584 |
| AD-1553826 | usasugggCfaGfUfUfuguggcugguL96 | 315 | asCfscagCfcAfCfaaacUfgCfccauasgsa | 450 | UCUAUGGGCAGUUUGUGGCUGGU | 585 |
| AD-1553832 | csasguuuGfuGfGfCfuggugagacuL96 | 316 | asGfsucuCfaCfCfagccAfcAfaacugscsc | 451 | GGCAGUUUGUGGCUGGUGAGACA | 586 |
| AD-1553839 | usgsgcugGfuGfAfGfacagcagaguL96 | 317 | asCfsucuGfcUfGfucucAfcCfagccascsa | 452 | UGUGGCUGGUGAGACAGCAGAGG | 587 |
| AD-1553845 | gsusgagaCfaGfCfAfgaggagguguL96 | 318 | asCfsaccUfcCfUfcugcUfgUfcucacscsa | 453 | UGGUGAGACAGCAGAGGAGGUGA | 588 |
| AD-1553852 | asgscagaGfgAfGfGfugaagggcuuL96 | 319 | asAfsgccCfuUfCfaccuCfcUfcugcusgsu | 454 | ACAGCAGAGGAGGUGAAGGGCUG | 589 |
| AD-1553859 | gsasggugAfaGfGfGfcugcgugcauL96 | 320 | asUfsgcaCfgCfAfgcccUfuCfaccucscsu | 455 | AGGAGGUGAAGGGCUGCGUGCAG | 590 |
| AD-1553865 | asasgggcUfgCfGfUfgcagcagcuuL96 | 321 | asAfsgcuGfcUfGfcacgCfaGfcccuuscsa | 456 | UGAAGGGCUGCGUGCAGCAGCUG | 591 |
| AD-1553907 | usgscuggCfaGfUfGfcccacugaguL96 | 322 | asCfsucaGfuGfGfgcacUfgCfcagcasgsu | 457 | ACUGCUGGCAGUGCCCACUGAGG | 592 |
| AD-1553912 | gscsagugCfcCfAfCfugaggaggauL96 | 323 | asUfsccuCfcUfCfagugGfgCfacugescsa | 458 | UGGCAGUGCCCACUGAGGAGGAG | 593 |
| AD-1553922 | csusgaggAfgGfAfGfccggacucuuL96 | 324 | asAfsgagUfcCfGfgcucCfuCfcucagsusg | 459 | CACUGAGGAGGAGCCGGACUCUG | 594 |
| AD-1553930 | gsasgccgGfaCfUfCfugcugccaauL96 | 325 | asUfsuggCfaGfCfagagUfcCfggcucscsu | 460 | AGGAGCCGGACUCUGCUGCCAAG | 595 |
| AD-1553937 | ascsucugCfuGfCfCfaagagugguuL96 | 326 | asAfsccaCfuCfUfuggcAfgCfagaguscsc | 461 | GGACUCUGCUGCCAAGAGUGGUG | 596 |
| AD-1553942 | gscsugccAfaGfAfGfuggugaggcuL96 | 327 | asGfsccuCfaCfCfacucUfuGfgcagcsasg | 462 | CUGCUGCCAAGAGUGGUGAGGCG | 597 |
| AD-1553951 | asgsugguGfaGfGfCfgugguaugauL96 | 328 | asUfscauAfcCfAfcgccUfcAfccacuscsu | 463 | AGAGUGGUGAGGCGUGGUAUGAG | 598 |
| AD-1553957 | asasccucGfgUfGfCfuaugcugcguL96 | 329 | asCfsgcaGfcAfUfagcaCfcGfagguuscsc | 464 | GGAACCUCGGUGCUAUGCUGCGG | 599 |
| AD-1553962 | csgsgugcUfaUfGfCfugcgguguguL96 | 330 | asCfsacaCfcGfCfagcaUfaGfcaccgsasg | 465 | CUCGGUGCUAUGCUGCGGUGUGU | 600 |
| AD-1553967 | csusaugcUfgCfGfGfuguguggacuL96 | 331 | asGfsuccAfcAfCfaccgCfaGfcauagscsa | 466 | UGCUAUGCUGCGGUGUGUGGACC | 601 |
| AD-1553975 | csgsguguGfuGfGfAfccugucacguL96 | 332 | asCfsgugAfcAfGfguccAfcAfcaccgscsa | 467 | UGCGGUGUGUGGACCUGUCACGG | 602 |
| AD-1553988 | gsgsccagCfcUfCfAfugcagcugauL96 | 333 | asUfscagCfuGfCfaugaGfgCfuggccsusc | 468 | GAGGCCAGCCUCAUGCAGCUGAA | 603 |
| AD-1553993 | gscscucaUfgCfAfGfcugaagguguL96 | 334 | asCfsaccUfuCfAfgcugCfaUfgaggcsusg | 469 | CAGCCUCAUGCAGCUGAAGGUGA | 604 |
| AD-1553998 | asusgcagCfuGfAfAfggugacggcuL96 | 335 | asGfsccgUfcAfCfcuucAfgCfugcausgsa | 470 | UCAUGCAGCUGAAGGUGACGGCG | 605 |
| AD-1554003 | gscsugaaGfgUfGfAfcggcgcugauL96 | 336 | asUfscagCfgCfCfgucaCfcUfucagesusg | 471 | CAGCUGAAGGUGACGGCGCUGAC | 606 |
| AD-1554009 | gsgsugacGfgCfGfCfugaccaguauL96 | 337 | asUfsacuGfgUfCfagcgCfcGfucaccsusu | 472 | AAGGUGACGGCGCUGACCAGUAC | 607 |
| AD-1554018 | gscsugacCfaGfUfAfcucggcucuuL96 | 338 | asAfsgagCfcGfAfguacUfgGfucagesgsc | 473 | GCGCUGACCAGUACUCGGCUCUG | 608 |
| AD-1554025 | asgsuacuCfgGfCfUfcuguaaggauL96 | 339 | asUfsccuUfaCfAfgagcCfgAfguacusgsg | 474 | CCAGUACUCGGCUCUGUAAGGAG | 609 |
| AD-1554030 | uscsggcuCfuGfUfAfaggagcuaguL96 | 340 | asCfsuagCfuCfCfuuacAfgAfgccgasgsu | 475 | ACUCGGCUCUGUAAGGAGCUAGC | 610 |
| AD-1554036 | csusguaaGfgAfGfCfuagccucguuL96 | 341 | asAfscgaGfgCfUfagcuCfcUfuacagsasg | 476 | CUCUGUAAGGAGCUAGCCUCGUG | 611 |
| AD-1554041 | asgsgagcUfaGfCfCfucgugggucuL96 | 342 | asGfsaccCfaCfGfaggcUfaGfcuccususa | 477 | UAAGGAGCUAGCCUCGUGGGUCA | 612 |
| AD-1554048 | asgsccucGfuGfGfGfucagaaggcuL96 | 343 | asGfsccuUfcUfGfacccAfcGfaggcusasg | 478 | CUAGCCUCGUGGGUCAGAAGGCC | 613 |
| AD-1554054 | gsusggguCfaGfAfAfggccaggaguL96 | 344 | asCfsuccUfgGfCfcuucUfgAfcccacsgsa | 479 | UCGUGGGUCAGAAGGCCAGGAGC | 614 |
| AD-1554065 | gsgsccagGfaGfCfCfuccuuggaguL96 | 345 | asCfsuccAfaGfGfaggcUfcCfuggccsusu | 480 | AAGGCCAGGAGCCUCCUUGGAGC | 615 |
| AD-1554070 | gsgsagccUfcCfUfUfggagcugaguL96 | 346 | asCfsucaGfcUfCfcaagGfaGfgcuccsusg | 481 | CAGGAGCCUCCUUGGAGCUGAGC | 616 |
| AD-1554074 | gsasgaggCfuGfGfCfugaagcuauuL96 | 347 | asAfsuagCfuUfCfagccAfgCfcucucsgsg | 482 | CCGAGAGGCUGGCUGAAGCUAUG | 617 |
| AD-1554082 | gsgscugaAfgCfUfAfuggacucuguL96 | 348 | asCfsagaGfuCfCfauagCfuUfcagccsasg | 483 | CUGGCUGAAGCUAUGGACUCUGG | 618 |
| AD-1554089 | gscsuaugGfaCfUfCfugggcagaauL96 | 349 | asUfsucuGfcCfCfagagUfcCfauagcsusu | 484 | AAGCUAUGGACUCUGGGCAGAAC | 619 |
| AD-1554097 | csuscuggGfcAfGfAfaccuccagguL96 | 350 | asCfscugGfaGfGfuucuGfcCfcagagsusc | 485 | GACUCUGGGCAGAACCUCCAGGU | 620 |
| AD-1554106 | gsasaccuCfcAfGfGfucuccugccuL96 | 351 | asGfsgcaGfgAfGfaccuGfgAfgguucsusg | 486 | CAGAACCUCCAGGUCUCCUGCCU | 621 |
| AD-1554111 | uscscaggUfcUfCfCfugccucaauuL96 | 352 | asAfsuugAfgGfCfaggaGfaCfcuggasgsg | 487 | CCUCCAGGUCUCCUGCCUCAAUG | 622 |
| AD-1554119 | uscscugcCfuCfAfAfugcugagcauL96 | 353 | asUfsgcuCfaGfCfauugAfgGfcaggasgsa | 488 | UCUCCUGCCUCAAUGCUGAGCAG | 623 |
| AD-1554126 | uscsaaugCfuGfAfGfcagaaccaguL96 | 354 | asCfsuggUfuCfUfgcucAfgCfauugasgsg | 489 | CCUCAAUGCUGAGCAGAACCAGC | 624 |
| AD-1554131 | gscsugagCfaGfAfAfccagcaccuuL96 | 355 | asAfsgguGfcUfGfguucUfgCfucagesasu | 490 | AUGCUGAGCAGAACCAGCACCUC | 625 |
| AD-1554156 | gscsaucgGfgUfGfGfcacaguauguL96 | 356 | asCfsauaCfuGfUfgccaCfcCfgaugcsasg | 491 | CUGCAUCGGGUGGCACAGUAUGC | 626 |
| AD-1554186 | csusccugGfuGfGfAfugcggaguauL96 | 357 | asUfsacuCfcGfCfauccAfcCfaggagscsc | 492 | GGCUCCUGGUGGAUGCGGAGUAC | 627 |
| AD-1554193 | usgsgaugCfgGfAfGfuacaccucauL96 | 358 | asUfsgagGfuGfUfacucCfgCfauccascsc | 493 | GGUGGAUGCGGAGUACACCUCAC | 628 |
| AD-1554198 | gscsggagUfaCfAfCfcucacugaauL96 | 359 | asUfsucaGfuGfAfggugUfaCfuccgcsasu | 494 | AUGCGGAGUACACCUCACUGAAC | 629 |
| AD-1554203 | gsusacacCfuCfAfCfugaacccuguL96 | 360 | asCfsaggGfuUfCfagugAfgGfuguacsusc | 495 | GAGUACACCUCACUGAACCCUGC | 630 |
| AD-1554210 | uscsacugAfaCfCfCfugcgcucucuL96 | 361 | asGfsagaGfcGfCfagggUfuCfagugasgsg | 496 | CCUCACUGAACCCUGCGCUCUCG | 631 |
| AD-1554216 | asascccuGfcGfCfUfcucgcugcuuL96 | 362 | asAfsgcaGfcGfAfgagcGfcAfggguuscsa | 497 | UGAACCCUGCGCUCUCGCUGCUG | 632 |
| AD-1554263 | cscscuggGfuGfUfGfgaacaccuauL96 | 363 | asUfsaggUfgUfUfccacAfcCfcagggscsc | 498 | GGCCCUGGGUGUGGAACACCUAC | 633 |
| AD-1554268 | gsgsugugGfaAfCfAfccuaccagguL96 | 364 | asCfscugGfuAfGfguguUfcCfacacescsa | 499 | UGGGUGUGGAACACCUACCAGGC | 634 |
| AD-1554278 | ascscuacCfaGfGfCfcugucuaaauL96 | 365 | asUfsuuaGfaCfAfggccUfgGfuaggusgsu | 500 | ACACCUACCAGGCCUGUCUAAAG | 635 |
| AD-1554287 | gscscuguCfuAfAfAfggacacauuuL96 | 366 | asAfsaugUfgUfCfcuuuAfgAfcaggcscsu | 501 | AGGCCUGUCUAAAGGACACAUUC | 636 |
| AD-1554292 | uscsuaaaGfgAfCfAfcauucgagcuL96 | 367 | asGfscucGfaAfUfguguCfcUfuuagascsa | 502 | UGUCUAAAGGACACAUUCGAGCG | 637 |
| AD-1554298 | gsgsacacAfuUfCfGfagcggcugguL96 | 368 | asCfscagCfcGfCfucgaAfuGfuguccsusu | 503 | AAGGACACAUUCGAGCGGCUGGG | 638 |
| AD-1554317 | gsgsccuuCfgGfAfGfugaagcugguL96 | 369 | asCfscagCfuUfCfacucCfgAfaggccsasg | 504 | CUGGCCUUCGGAGUGAAGCUGGU | 639 |
| AD-1554323 | csgsgaguGfaAfGfCfugguacgaguL96 | 370 | asCfsucgUfaCfCfagcuUfcAfcuccgsasa | 505 | UUCGGAGUGAAGCUGGUACGAGG | 640 |
| AD-1554328 | usgsaagcUfgGfUfAfcgaggugcauL96 | 371 | asUfsgcaCfcUfCfguacCfaGfcuucascsu | 506 | AGUGAAGCUGGUACGAGGUGCAU | 641 |
| AD-1554333 | csusgguaCfgAfGfGfugcauaucuuL96 | 372 | asAfsgauAfuGfCfaccuCfgUfaccagscsu | 507 | AGCUGGUACGAGGUGCAUAUCUG | 642 |
| AD-1554340 | gsasggugCfaUfAfUfcuggacaaguL96 | 373 | asCfsuugUfcCfAfgauaUfgCfaccucsgsu | 508 | ACGAGGUGCAUAUCUGGACAAGG | 643 |
| AD-1554346 | csasuaucUfgGfAfCfaaggagagauL96 | 374 | asUfscucUfcCfUfugucCfaGfauaugscsa | 509 | UGCAUAUCUGGACAAGGAGAGAG | 644 |
| AD-1554351 | csusggacAfaGfGfAfgagagcgguuL96 | 375 | asAfsccgCfuCfUfcuccUfuGfuccagsasu | 510 | AUCUGGACAAGGAGAGAGCGGUG | 645 |
| AD-1554371 | gscsccagCfuCfCfAfugggauggauL96 | 376 | asUfsccaUfcCfCfauggAfgCfugggcscsa | 511 | UGGCCCAGCUCCAUGGGAUGGAA | 646 |
| AD-1554376 | gscsuccaUfgGfGfAfuggaagaccuL96 | 377 | asGfsgucUfuCfCfauccCfaUfggagcsusg | 512 | CAGCUCCAUGGGAUGGAAGACCC | 647 |
| AD-1554379 | csuscagcCfuGfAfCfuaugaggccuL96 | 378 | asGfsgccUfcAfUfagucAfgGfcugagsusg | 513 | CACUCAGCCUGACUAUGAGGCCA | 648 |
| AD-1554387 | gsascuauGfaGfGfCfcaccagucauL96 | 379 | asUfsgacUfgGfUfggccUfcAfuagucsasg | 514 | CUGACUAUGAGGCCACCAGUCAG | 649 |
| AD-1554393 | gsasggccAfcCfAfGfucagaguuauL96 | 380 | asUfsaacUfcUfGfacugGfuGfgccucsasu | 515 | AUGAGGCCACCAGUCAGAGUUAC | 650 |
| AD-1554399 | ascscaguCfaGfAfGfuuacagccguL96 | 381 | asCfsggcUfgUfAfacucUfgAfcuggusgsg | 516 | CCACCAGUCAGAGUUACAGCCGC | 651 |
| AD-1554404 | uscsagagUfuAfCfAfgccgcugccuL96 | 382 | asGfsgcaGfcGfGfcuguAfaCfucugascsu | 517 | AGUCAGAGUUACAGCCGCUGCCU | 652 |
| AD-1554413 | csasgccgCfuGfCfCfuggaacugauL96 | 383 | asUfscagUfuCfCfaggcAfgCfggcugsusa | 518 | UACAGCCGCUGCCUGGAACUGAU | 653 |
| AD-1554418 | gscsugccUfgGfAfAfcugaugcuguL96 | 384 | asCfsagcAfuCfAfguucCfaGfgcagcsgsg | 519 | CCGCUGCCUGGAACUGAUGCUGA | 654 |
| AD-1554425 | gsgsaacuGfaUfGfCfugacgcacguL96 | 385 | asCfsgugCfgUfCfagcaUfcAfguuccsasg | 520 | CUGGAACUGAUGCUGACGCACGU | 655 |
| AD-1554430 | usgsaugcUfgAfCfGfcacguggccuL96 | 386 | asGfsgccAfcGfUfgcguCfaGfcaucasgsu | 521 | ACUGAUGCUGACGCACGUGGCCC | 656 |
| AD-1554433 | csasugugCfcAfCfCfucauggugguL96 | 387 | asCfscacCfaUfGfagguGfgCfacaugsgsg | 522 | CCCAUGUGCCACCUCAUGGUGGC | 657 |
| AD-1554443 | csuscaugGfuGfGfCfuucccacaauL96 | 388 | asUfsuguGfgGfAfagccAfcCfaugagsgsu | 523 | ACCUCAUGGUGGCUUCCCACAAU | 658 |
| AD-1554451 | gsgscuucCfcAfCfAfaugaggaauuL96 | 389 | asAfsuucCfuCfAfuuguGfgGfaagccsasc | 524 | GUGGCUUCCCACAAUGAGGAAUC | 659 |
| AD-1554456 | cscscacaAfuGfAfGfgaaucuguuuL96 | 390 | asAfsacaGfaUfUfccucAfuUfgugggsasa | 525 | UUCCCACAAUGAGGAAUCUGUUC | 660 |
| AD-1554461 | asasugagGfaAfUfCfuguucgccauL96 | 391 | asUfsggcGfaAfCfagauUfcCfucauusgsu | 526 | ACAAUGAGGAAUCUGUUCGCCAG | 661 |
| AD-1554470 | uscsuguuCfgCfCfAfggcaaccaauL96 | 392 | asUfsuggUfuGfCfcuggCfgAfacagasusu | 527 | AAUCUGUUCGCCAGGCAACCAAG | 662 |
| AD-1554475 | uscsgccaGfgCfAfAfccaagcgcauL96 | 393 | asUfsgcgCfuUfGfguugCfcUfggcgasasc | 528 | GUUCGCCAGGCAACCAAGCGCAU | 663 |
| AD-1554482 | gscsaaccAfaGfCfGfcaugugggauL96 | 394 | asUfscccAfcAfUfgcgcUfuGfguugcscsu | 529 | AGGCAACCAAGCGCAUGUGGGAG | 664 |
| AD-1554487 | csasagcgCfaUfGfUfgggagcugguL96 | 395 | asCfscagCfuCfCfcacaUfgCfgcuugsgsu | 530 | ACCAAGCGCAUGUGGGAGCUGGG | 665 |
| AD-1554492 | gscsauguGfgGfAfGfcugggcauuuL96 | 396 | asAfsaugCfcCfAfgcucCfcAfcaugesgsc | 531 | GCGCAUGUGGGAGCUGGGCAUUC | 666 |
| AD-1554497 | usgsggagCfuGfGfGfcauuccucuuL96 | 397 | asAfsgagGfaAfUfgcccAfgCfucccascsa | 532 | UGUGGGAGCUGGGCAUUCCUCUG | 667 |
| AD-1554505 | gsgsgcauUfcCfUfCfuggaugggauL96 | 398 | asUfscccAfuCfCfagagGfaAfugcccsasg | 533 | CUGGGCAUUCCUCUGGAUGGGAC | 668 |
| AD-1554510 | ususccucUfgGfAfUfgggacugucuL96 | 399 | asGfsacaGfuCfCfcaucCfaGfaggaasusg | 534 | CAUUCCUCUGGAUGGGACUGUCU | 669 |
| AD-1554515 | csusggauGfgGfAfCfugucuguuuuL96 | 400 | asAfsaacAfgAfCfagucCfcAfuccagsasg | 535 | CUCUGGAUGGGACUGUCUGUUUC | 670 |
| AD-1554520 | usgsggacUfgUfCfUfguuucggacuL96 | 401 | asGfsuccGfaAfAfcagaCfaGfucccasusc | 536 | GAUGGGACUGUCUGUUUCGGACA | 671 |
| AD-1554525 | csusgucuGfuUfUfCfggacaacuuuL96 | 402 | asAfsaguUfgUfCfcgaaAfcAfgacagsusc | 537 | GACUGUCUGUUUCGGACAACUUC | 672 |
| AD-1554533 | ususcggaCfaAfCfUfucugggcauuL96 | 403 | asAfsugcCfcAfGfaaguUfgUfccgaasasc | 538 | GUUUCGGACAACUUCUGGGCAUG | 673 |
| AD-1554542 | csusucugGfgCfAfUfgugugaccauL96 | 404 | asUfsgguCfaCfAfcaugCfcCfagaagsusu | 539 | AACUUCUGGGCAUGUGUGACCAC | 674 |
| AD-1554551 | asusguguGfaCfCfAfegucucucuuL96 | 405 | asAfsgagAfgAfCfguggUfcAfcacausgsc | 540 | GCAUGUGUGACCACGUCUCUCUA | 675 |
| AD-1554557 | gsasccacGfuCfUfCfucuagcacuuL96 | 406 | asAfsgugCfuAfGfagagAfcGfuggucsasc | 541 | GUGACCACGUCUCUCUAGCACUG | 676 |
| AD-1554562 | gscsaggcCfgGfCfUfauguaguguuL96 | 407 | asAfscacUfaCfAfuagcCfgGfccugescsc | 542 | GGGCAGGCCGGCUAUGUAGUGUA | 677 |
| AD-1554567 | cscsggcuAfuGfUfAfguguauaaguL96 | 408 | asCfsuuaUfaCfAfcuacAfuAfgccggscsc | 543 | GGCCGGCUAUGUAGUGUAUAAGU | 678 |
| AD-1554573 | asusguagUfgUfAfUfaaguccauuuL96 | 409 | asAfsaugGfaCfUfuauaCfaCfuacausasg | 544 | CUAUGUAGUGUAUAAGUCCAUUC | 679 |
| AD-1554578 | gsusguauAfaGfUfCfcauucccuauL96 | 410 | asUfsaggGfaAfUfggacUfuAfuacacsusa | 545 | UAGUGUAUAAGUCCAUUCCCUAU | 680 |
| AD-1554584 | asasguccAfuUfCfCfcuauggcucuL96 | 411 | asGfsagcCfaUfAfgggaAfuGfgacuusasu | 546 | AUAAGUCCAUUCCCUAUGGCUCC | 681 |
| AD-1554591 | ususcccuAfuGfGfCfuccuuggaguL96 | 412 | asCfsuccAfaGfGfagccAfuAfgggaasusg | 547 | CAUUCCCUAUGGCUCCUUGGAGG | 682 |
| AD-1554599 | gsgscuccUfuGfGfAfggagguaauuL96 | 413 | asAfsuuaCfcUfCfcuccAfaGfgagecsasu | 548 | AUGGCUCCUUGGAGGAGGUAAUC | 683 |
| AD-1554609 | asusccggAfgGfGfCfccaggagaauL96 | 414 | asUfsucuCfcUfGfggccCfuCfcggauscsa | 549 | UGAUCCGGAGGGCCCAGGAGAAC | 684 |
| AD-1554626 | gsasaccgGfaGfCfGfugcuucagguL96 | 415 | asCfscugAfaGfCfacgcUfcCfgguucsusc | 550 | GAGAACCGGAGCGUGCUUCAGGG | 685 |
| AD-1554642 | csasggguGfcCfCfGfcagggaacauL96 | 416 | asUfsguuCfcCfUfgcggGfcAfcccugsasa | 551 | UUCAGGGUGCCCGCAGGGAACAG | 686 |
| AD-1554653 | csasgggaAfcAfGfGfagcugcucauL96 | 417 | asUfsgagCfaGfCfuccuGfuUfcccugscsg | 552 | CGCAGGGAACAGGAGCUGCUCAG | 687 |
| AD-1554658 | asascaggAfgCfUfGfcucagccaauL96 | 418 | asUfsuggCfuGfAfgcagCfuCfcuguuscsc | 553 | GGAACAGGAGCUGCUCAGCCAAG | 688 |
| AD-1554663 | gsasgcugCfuCfAfGfccaagaacuuL96 | 419 | asAfsguuCfuUfGfgcugAfgCfagcucscsu | 554 | AGGAGCUGCUCAGCCAAGAACUG | 689 |
| AD-1554668 | gscsucagCfcAfAfGfaacuguggcuL96 | 420 | asGfsccaCfaGfUfucuuGfgCfugagcsasg | 555 | CUGCUCAGCCAAGAACUGUGGCG | 690 |
| AD-1554690 | usgsccagGfaUfGfCfcgaaggauauL96 | 421 | asUfsaucCfuUfCfggcaUfcCfuggcasgsc | 556 | GCUGCCAGGAUGCCGAAGGAUAC | 691 |
| AD-1554696 | uscsauguGfgUfCfAfauaaaagucuL96 | 422 | asGfsacuUfuUfAfuugaCfcAfcaugascsc | 557 | GGUCAUGUGGUCAAUAAAAGUCC | 692 |
| AD-1554704 | uscsaauaAfaAfGfUfccuuagguguL96 | 423 | asCfsaccUfaAfGfgacuUfuUfauugascsc | 558 | GGUCAAUAAAAGUCCUUAGGUGC | 693 |
| AD-1554709 | asasaaguCfcUfUfAfggugcugccuL96 | 424 | asGfsgcaGfcAfCfcuaaGfgAfcuuuusasu | 559 | AUAAAAGUCCUUAGGUGCUGCCU | 694 |

TABLE 4
Single Dose Screens in Hepa1-6 Cells

10 nM

| | % message | |
|---|---|---|
| Duplex ID | remaining | Std Dev. |
| AD-1554709.1 | 40.486 | 1.013 |
| AD-1554704.1 | 22.394 | 1.022 |
| AD-1554696.1 | 23.888 | 1.635 |
| AD-1554690.1 | 40.434 | 4.562 |
| AD-1554668.1 | 74.317 | 2.063 |
| AD-1554663.1 | 36.263 | 0.994 |
| AD-1554658.1 | 35.073 | 1.925 |
| AD-1554653.1 | 57.626 | 2.793 |
| AD-1554642.1 | 89.236 | 4.943 |
| AD-1554626.1 | 57.334 | 3.850 |
| AD-1554609.1 | 83.203 | 5.026 |
| AD-1554599.1 | 46.652 | 5.050 |
| AD-1554591.1 | 50.761 | 4.724 |
| AD-1554584.1 | 46.145 | 2.735 |
| AD-1554578.1 | 13.416 | 0.528 |
| AD-1554573.1 | 18.273 | 0.669 |
| AD-1554567.1 | 33.820 | 2.611 |
| AD-1554562.1 | 59.732 | 2.691 |
| AD-1554557.1 | 30.270 | 1.655 |
| AD-1554551.1 | 39.334 | 2.019 |
| AD-1554542.1 | 48.229 | 1.983 |
| AD-1554533.1 | 38.616 | 0.942 |
| AD-1554525.1 | 34.441 | 1.608 |
| AD-1554520.1 | 40.858 | 3.374 |
| AD-1554515.1 | 33.564 | 1.633 |
| AD-1554510.1 | 46.534 | 1.608 |
| AD-1554505.1 | 56.558 | 4.627 |
| AD-1554497.1 | 46.686 | 4.739 |
| AD-1554492.1 | 75.147 | 8.345 |
| AD-1554487.1 | 74.620 | 4.143 |
| AD-1554482.1 | 73.204 | 2.197 |
| AD-1554475.1 | 46.378 | 2.914 |
| AD-1554470.1 | 49.372 | 4.776 |
| AD-1554461.1 | 31.386 | 2.067 |
| AD-1554456.1 | 40.648 | 0.592 |
| AD-1554451.1 | 55.371 | 2.280 |
| AD-1554443.1 | 71.880 | 5.787 |
| AD-1554433.1 | 90.347 | 6.806 |
| AD-1554430.1 | 76.854 | 8.316 |
| AD-1554425.1 | 41.378 | 2.760 |
| AD-1554418.1 | 60.641 | 3.416 |
| AD-1554413.1 | 64.838 | 3.374 |
| AD-1554404.1 | 67.556 | 5.043 |
| AD-1554399.1 | 44.133 | 6.063 |
| AD-1554393.1 | 60.568 | 4.342 |
| AD-1554387.1 | 48.650 | 3.375 |
| AD-1554379.1 | 57.222 | 4.137 |
| AD-1554376.1 | 60.247 | 5.122 |
| AD-1554371.1 | 60.296 | 4.601 |
| AD-1554351.1 | 46.181 | 4.832 |
| AD-1554346.1 | 60.147 | 2.366 |
| AD-1554340.1 | 33.500 | 0.626 |
| AD-1554333.1 | 34.328 | 2.823 |
| AD-1554328.1 | 41.623 | 2.381 |
| AD-1554323.1 | 37.338 | 2.012 |
| AD-1554317.1 | 41.072 | 1.996 |
| AD-1554298.1 | 67.852 | 3.098 |
| AD-1554292.1 | 41.200 | 2.549 |
| AD-1554287.1 | 38.395 | 2.894 |
| AD-1554278.1 | 38.351 | 1.544 |
| AD-1554268.1 | 78.472 | 4.129 |
| AD-1554263.1 | 102.376 | 6.736 |
| AD-1554216.1 | 71.741 | 2.510 |
| AD-1554210.1 | 43.604 | 2.379 |
| AD-1554203.1 | 40.188 | 3.785 |
| AD-1554198.1 | 39.458 | 3.492 |
| AD-1554193.1 | 39.063 | 4.214 |
| AD-1554186.1 | 58.670 | 4.310 |
| AD-1554156.1 | 66.772 | 5.167 |
| AD-1554131.1 | 52.013 | 5.113 |
| AD-1554126.1 | 34.666 | 2.127 |
| AD-1554119.1 | 38.030 | 4.100 |
| AD-1554111.1 | 42.534 | 1.661 |
| AD-1554106.1 | 80.452 | 4.161 |
| AD-1554097.1 | 88.765 | 3.933 |
| AD-1554089.1 | 41.998 | 2.933 |
| AD-1554082.1 | 29.111 | 1.216 |
| AD-1554074.1 | 41.463 | 2.465 |
| AD-1554070.1 | 86.644 | 4.767 |
| AD-1554065.1 | 72.993 | 3.738 |
| AD-1554054.1 | 75.399 | 3.423 |
| AD-1554048.1 | 67.456 | 4.510 |
| AD-1554041.1 | 56.167 | 0.907 |
| AD-1554036.1 | 31.755 | 1.779 |
| AD-1554030.1 | 51.404 | 2.796 |
| AD-1554025.1 | 74.960 | 7.000 |
| AD-1554018.1 | 48.095 | 1.987 |
| AD-1554009.1 | 54.570 | 5.545 |
| AD-1554003.1 | 44.773 | 4.406 |
| AD-1553998.1 | 55.658 | 4.737 |
| AD-1553993.1 | 41.387 | 2.083 |
| AD-1553988.1 | 77.343 | 7.135 |
| AD-1553975.1 | 41.410 | 2.404 |
| AD-1553967.1 | 45.208 | 0.448 |
| AD-1553962.1 | 39.197 | 2.597 |
| AD-1553957.1 | 47.595 | 2.948 |
| AD-1553951.1 | 49.765 | 3.714 |
| AD-1553942.1 | 56.434 | 1.981 |
| AD-1553937.1 | 48.237 | 5.216 |
| AD-1553930.1 | 49.658 | 2.420 |
| AD-1553922.1 | 82.498 | 6.383 |
| AD-1553912.1 | 71.868 | 5.425 |
| AD-1553907.1 | 65.276 | 5.113 |
| AD-1553865.1 | 92.312 | 6.707 |
| AD-1553859.1 | 64.886 | 5.279 |
| AD-1553852.1 | 73.402 | 3.596 |
| AD-1553845.1 | 68.482 | 3.746 |
| AD-1553839.1 | 55.291 | 1.063 |
| AD-1553832.1 | 37.197 | 1.462 |
| AD-1553826.1 | 41.497 | 2.248 |
| AD-1553820.1 | 35.047 | 2.019 |
| AD-1553815.1 | 69.052 | 2.235 |
| AD-1553809.1 | 19.470 | 1.711 |
| AD-1553804.1 | 56.786 | 3.837 |
| AD-1553799.1 | 59.339 | 5.390 |
| AD-1553794.1 | 36.654 | 2.926 |
| AD-1553769.1 | 42.571 | 1.305 |
| AD-1553758.1 | 42.148 | 4.268 |
| AD-1553751.1 | 54.288 | 2.766 |
| AD-1553745.1 | 69.180 | 7.012 |
| AD-1553739.1 | 73.970 | 5.709 |
| AD-1553730.1 | 60.420 | 3.480 |
| AD-1553722.1 | 56.768 | 5.561 |
| AD-1553715.1 | 85.067 | 4.522 |
| AD-1553707.1 | 88.537 | 6.241 |
| AD-1553701.1 | 70.150 | 5.426 |
| AD-1553697.1 | 59.006 | 3.370 |
| AD-1553691.1 | 52.735 | 3.736 |
| AD-1553686.1 | 75.624 | 4.252 |
| AD-1553681.1 | 39.710 | 4.726 |
| AD-1553674.1 | 24.546 | 1.078 |
| AD-1553667.1 | 65.843 | 3.039 |
| AD-1553662.1 | 63.318 | 2.521 |
| AD-1553635.1 | 78.121 | 1.995 |
| AD-1553630.1 | 50.076 | 2.736 |

Informal Sequence Listing

| | |
|---|---|
| <210> | 1 |
| <211> | 1473 |
| <213> | Homo sapiens |
| <400> | 1 |

| | |
|---|---|
| agagaacctt ccctggtgtg gaggcagcca gggacccagg atgctccgga cctgttacgt | 60 |
| gctctgttcc caagctggtc ccccctccag gggctggcag tccctgagct ttgatggcgg | 120 |
| ggccttccac cttaagggca caggagagct gacacgggcc ttgctggttc tccggctgtg | 180 |
| tgcctggccc ccactcgtca ctcacgggct gttgctccag gcctggtctc ggcgactcct | 240 |
| gggctcccgg ctctcaggcg catttctccg agcatccgtc tatgggcagt ttgtggctgg | 300 |
| tgagacagca gaggaggtga agggctgcgt gcagcagctg cggaccctca gcctccgacc | 360 |
| actgctggca gtgcccactg aggaggagcc ggactctgct gccaagagtg gtgaggcgtg | 420 |
| gtatgagggg aacctcggtg ctatgctgcg gtgtgtggac ctgtcacggg gcctcctgga | 480 |
| gccccccagc ctggctgagg ccagcctcat gcagctgaag gtgacggcgc tgaccagtac | 540 |
| tcggctctgt aaggagctag cctcgtgggt cagaaggcca ggagcctcct tggagctgag | 600 |
| ccccgagagg ctggctgaag ctatggactc tgggcagaac ctccaggtct cctgcctcaa | 660 |
| tgctgagcag aaccagcacc tccgggcctc cctcagccgc ctgcatcggg tggcacagta | 720 |
| tgcccgggcc cagcacgtgc ggctcctggt ggatgcggag tacacctcac tgaaccctgc | 780 |
| gctctcgctg ctggtggctg ccctggctgt gcgctggaac agcccgggtg aaggcgggcc | 840 |
| ctgggtgtgg aacacctacc aggcctgtct aaaggacaca ttcgagcggc tggggaggga | 900 |
| tgcagaggct gcgcacaggg ccggcctggc cttcggagtg aagctggtac gaggtgcata | 960 |
| tctggacaag gagagagcgg tggcccagct ccatgggatg gaagacccca ctcagcctga | 1020 |
| ctatgaggcc accagtcaga gttacagccg ctgcctggaa ctgatgctga cgcacgtggc | 1080 |
| ccgccatggc cccatgtgcc acctcatggt ggcttcccac aatgaggaat ctgttcgcca | 1140 |
| ggcaaccaag cgcatgtggg agctgggcat tcctctggat gggactgtct gtttcggaca | 1200 |
| acttctgggc atgtgtgacc acgtctctct agcactgggg caggccggct atgtagtgta | 1260 |
| taagtccatt ccctatggct ccttggagga ggtaatcccc tacctgatcc ggagggccca | 1320 |
| ggagaaccgg agcgtgcttc agggtgcccg cagggaacag gagctgctca gccaagaact | 1380 |
| gtggcggcgg ctgctgccag gatgccgaag gataccccac tagcacccct gagggggtca | 1440 |
| tgtggtcaat aaaagtcctt aggtgctgcc taa | 1473 |

| | |
|---|---|
| <210> | 2 |
| <211> | 1473 |
| <212> | DNA |
| <213> | Homo sapiens |
| <400> | 2 |

| | |
|---|---|
| ttaggcagca cctaaggact tttattgacc acatgacccc ctcaggggtg ctagtggggt | 60 |
| atccttcggc atcctggcag cagccgccgc cacagttctt ggctgagcag ctcctgttcc | 120 |
| ctgcgggcac cctgaagcac gctccggttc tcctgggccc tccggatcag gtaggggatt | 180 |
| acctcctcca aggagccata gggaatggac ttatacacta catagccggc ctgccccagt | 240 |
| gctagagaga cgtggtcaca catgcccaga agttgtccga aacagacagt cccatccaga | 300 |
| ggaatgccca gctcccacat gcgcttggtt gcctggcgaa cagattcctc attgtgggaa | 360 |
| gccaccatga ggtggcacat ggggccatgg gggccacgt gcgtcagcat cagttccagg | 420 |
| cagcggctgt aactctgact ggtggcctca tagtcaggct gagtggggtc ttccatccca | 480 |
| tggagctggg ccaccgctct ctccttgtcc agatatgcac ctcgtaccag cttcactccg | 540 |
| aaggccaggc cggccctgtg cgcagcctct gcatccctcc ccagccgctc gaatgtgtcc | 600 |
| tttagacagg cctggtaggt gttccacacc cagggcccgc cttcacccgg gctgttccag | 660 |
| cgcacagcca gggcagccac cagcagcgag agcgcagggt tcagtgaggt gtactccgca | 720 |
| tccaccagga gccgcacgtg ctgggcccgg gcatactgtg ccacccgatg caggcggctg | 780 |
| agggaggccc ggaggtgctg gttctgctca gcattgaggc aggagacctg gaggttctgc | 840 |
| ccagagtcca tagcttcagc cagcctctcg gggctcagct ccaaggaggc tcctggcctt | 900 |
| ctgacccacg aggctagctc cttacagagc cgagtactgg tcagcgccgt caccttcagc | 960 |
| tgcatgaggc tggcctcagc caggctgggg ggctccagga ggccccgtga caggtccaca | 1020 |
| caccgcagca tagcaccgag gttcccctca taccacgcct caccactctt ggcagcagag | 1080 |
| tccggctcct cctcagtggg cactgccagc agtggtcgga ggctgagggt ccgcagctgc | 1140 |
| tgcacgcagc ccttcacctc ctctgctgtc tcaccagcca caaactgccc atagacggat | 1200 |
| gctcggagaa atgcgcctga gagccgggag cccaggagtc gccgagacca ggcctggagc | 1260 |
| aacagcccgt gagtgacgag tgggggccag gcacacagcc ggagaaccag caaggcccgt | 1320 |
| gtcagctctc ctgtgccctt aaggtggaag gccccgccat caaagctcag ggactgccag | 1380 |
| cccctggagg ggggaccagc ttgggaacag agcacgtaac aggtccggag catcctgggt | 1440 |
| ccctggctgc ctccacacca gggaaggttc tct | 1473 |

| | |
|---|---|
| <210> | 3 |
| <211> | 1817 |
| <213> | DNA |
| <213> | Mus Muculus |
| <400> | 3 |

| | |
|---|---|
| agtgtggtgg taaccaggca cttgcaatga tctggacgcg tctgccgctg tatggcccct | 60 |
| ccaagccctc tacaggtggc tggcagcccc tgcgctttga tggtggggcc ttccatgtca | 120 |
| agggaaccgc agaactggca cgggctttgc tagtgcttcg cctatgcgcc tggccccctt | 180 |
| tggtcactca tggactagcg tttcaggcct ggtctcagcg actcctggga tcccggctct | 240 |
| caggcgcact tcttcgagca tccatctacg ggcagtttgt ggccggggag acagcagagg | 300 |
| aagtgaggaa ctgtgtcggg cagctgcagg ccctgggact ccagcccctg ttggcagtac | 360 |
| ccaccgagga ggaaccagac tccactgcca agaccagtga ggtctggtat gaggagaacc | 420 |
| ttagcgccat gctgcgctgt gtggacttat cccgagccct cgtggacgcc cacggcccag | 480 |
| ccaggaacag cctcatgcag ctgaaggtga ccgcgctagc cagcactcgg ctttgtaaag | 540 |
| agctgtcggc ttggatccaa agacccagag gctcctcgga gctgagccct gagaggctgg | 600 |
| cagaagccat ggactcgggt cggaacctcc agctctcctg cctcagcaca gaacagaatc | 660 |
| agcacctgca ggcctccctc agccgcttgc accgagtggc acagcacgcc cgggcgaagt | 720 |
| gtgtgcggct gctggtagat gctgaatata ctttcattaa ccctgcactg tccctgctgg | 780 |
| tggctgccct ggctgtgcgc tggaacagcc ctgaggaagg tggtccgtgg gtgtggaaca | 840 |
| cttaccaggc ctatctaaag gacactcacc aacggctgga gcaggacgcc gaggcagcac | 900 |
| acaaggctgg cctggcattt ggggtgaagt tggtgcgagg tgcctatctg gacaaggaga | 960 |
| gatccatgac acagctccaa gggaaggaag actgtaccca gcctgactat gaggccacta | 1020 |
| gtcggagtta cagccgctgt ctagagctga tgctgcgctg cgtgtcgaac cacggtcccc | 1080 |
| cgtgtcacct catggtggct tcccacaatg aagaatccgt tcgccaggca actaagcgca | 1140 |
| tgtgggagct gggcattcct ctggatgggc ctgtctgttt tggacaactt ctgggcatgt | 1200 |
| gtgaccatgt ctccctggca ttagggcagg ctggatatat ggtgtacaag tctattccct | 1260 |
| atggctgcct ggaggaggtg attccctacc tgatccgaag agcccaggag aacaggagtg | 1320 |
| tgctgcaggg tgcccgcagg gagcaggcac tactcagcca ggaactgtgg cggagactgc | 1380 |
| tgggaaggac ggcctaagat gtctccatca gcaccatcag gggccatgtg ctcaataaag | 1440 |
| gtcccgagtc ctggccctgt ctgtacttct cagaagctgc ctccttgggg aaagggctga | 1500 |
| ccctggtgtc tgctcggaca ggtggggcat gcctgagact caagagatct ttagtcctgt | 1560 |
| gtggtggcac actcctgtta tcctagcact tgggaggctg agacaggagg gccatgtgtt | 1620 |
| ccaagccagc ctggactaca gagtgagaag aaggaagagg aggagtggga gaggggaggg | 1680 |
| gaggagaagt gctagcctag ggtggtagtg acttggtaac cgaagggtaa ttaatccttc | 1740 |
| aatgtgctta gccagggatc tagtcaagaa ttctttccct ctcagaggat ttgtaataaa | 1800 |
| caacacaggt gaatagc | 1817 |

| | |
|---|---|
| <210> | 4 |
| <211> | 1817 |
| <212> | DNA |
| <213> | Mus musculus |
| <400> | 4 |

| | |
|---|---|
| gctattcacc tgtgttgttt attacaaatc ctctgagagg gaaagaattc ttgactagat | 60 |
| ccctggctaa gcacattgaa ggattaatta cccttcggtt accaagtcac taccacccta | 120 |
| ggctagcact tctcctcccc tcccctctcc cactcctcct cttccttctt ctcactctgt | 180 |
| agtccaggct ggcttggaac acatggccct cctgtctcag cctcccaagt gctaggataa | 240 |
| caggagtgtg ccaccacaca ggactaaaga tctcttgagt ctcaggcatg ccccacctgt | 300 |
| ccgagcagac accagggtca gccctttccc caaggaggca gcttctgaga agtacagaca | 360 |
| gggccaggac tcgggacctt tattgagcac atggcccctg atggtgctga tggagacatc | 420 |
| ttaggccgtc cttcccagca gtctccgcca cagttcctgg ctgagtagtg cctgctccct | 480 |
| gcgggcaccc tgcagcacac tcctgttctc ctgggctctt cggatcaggt agggaatcac | 540 |
| ctcctccagg cagccatagg gaatagactt gtacaccata tatccagcct gccctaatgc | 600 |
| cagggagaca tggtcacaca tgcccagaag ttgtccaaaa cagacaggcc catccagagg | 660 |
| aatgcccagc tcccacatgc gcttagttgc ctggcgaacg gattcttcat tgtgggaagc | 720 |
| caccatgagg tgacacgggg gaccgtggtt cgacacgcag cgcagcatca gctctagaca | 780 |
| gcggctgtaa ctccgactag tggcctcata gtcaggctgg gtacagtctt ccttcccttg | 840 |
| gagctgtgtc atggatctct ccttgtccag ataggcacct cgcaccaact tcaccccaaa | 900 |
| tgccaggcca gccttgtgtg ctgcctcggc gtcctgctcc agccgttggt gagtgtcctt | 960 |
| tagataggcc tggtaagtgt tccacaccca cggaccacct tcctcagggc tgttccagcg | 1020 |
| cacagccagg gcagccacca gcagggacag tgcagggtta atgaaagtat attcagcatc | 1080 |
| taccagcagc cgcacacact tcgcccgggc gtgctgtgcc actcggtgca agcggctgag | 1140 |
| ggaggcctgc aggtgctgat tctgttctgt gctgaggcag gagagctgga ggttccgacc | 1200 |
| cgagtccatg gcttctgcca gcctctcagg gctcagctcc gaggagcctc tgggtctttg | 1260 |
| gatccaagcc gacagctctt tacaaagccg agtgctggct agcgcggtca ccttcagctg | 1320 |
| catgaggctg ttcctggctg ggccgtgggc gtccacgagg gctcgggata agtccacaca | 1380 |
| gcgcagcatg gcgctaaggt tctcctcata ccagacctca ctggtcttgg cagtggagtc | 1440 |
| tggttcctcc tcggtgggta ctgccaacag gggctggagt cccagggcct gcagctgccc | 1500 |
| gacacagttc ctcacttcct ctgctgtctc cccggccaca aactgcccgt agatggatgc | 1560 |
| tcgaagaagt gcgcctgaga gccgggatcc caggagtcgc tgagaccagg cctgaaacgc | 1620 |
| tagtccatga gtgaccaaag ggggccaggc gcataggcga agcactagca aagcccgtgc | 1680 |
| cagttctgcg gttcccttga catggaaggc cccaccatca aagcgcaggg gctgccagcc | 1740 |
| acctgtagag ggcttggagg ggccatacag cggcagacgc gtccagatca ttgcaagtgc | 1800 |
| ctggttacca ccacact | 1817 |

| | |
|---|---|
| <210> | 5 |
| <211> | 1466 |
| <212> | DNA |
| <213> | Rattus norvegicus |
| <400> | 5 |

| | |
|---|---|
| ggcacttaca atggtctgga cgcgtctgcc gctgtacggc cactccaagc cctctacagg | 60 |
| tggctggcag cccctgcgct ttgatggtgg ggccttccat ctcaagagaa ccgcagaact | 120 |
| ggcacgggct ttgctggtgc ttcgcctatg cgcctggccc cctttggtca ctcatggact | 180 |
| agcgtttcag gcctggtctc agcgactcct gggatctcgg ctctcgggcg cacttctccg | 240 |
| agcatccatc tatggacagt ttgtggccgg ggagacagca gaggaagtga ggggctgtgt | 300 |
| ccagcagctg caggcgatag gactccagcc cctgttggca gtgcccaccg aggaggaacc | 360 |
| agactccgct gccaagacca gtgaagcttg gtatgagggg aaccttagcg ccatgctgca | 420 |
| ctgtgtggac ttgtcacgag ctgtcgcaga cgcccatggc ccagccagga acagcctcat | 480 |
| gcagctgaag gtgaccgcgc taaccagccc tcggctttgt aaggagctat cggcttggat | 540 |
| ccaaagacca agaggctcct cggagctgag gcctgagagg ctggcagaag ccatggagtc | 600 |
| aggtcggaac ctccagctct cctgcctcag cacggaacag aatcaacacc tgcaggcctc | 660 |
| cctcagccgc ttgcaccgag tggcacagca cgcccgggcg caggatgtga ggctgctggt | 720 |
| ggacgctgaa tacacgttca tcaaccctgc cctgtccctg ctggtggctg ccctggctat | 780 |
| gcgctggaac agctcggagg aagagggccc gtgggtgtgg aacacttacc aggcctatct | 840 |
| gaaggacact cacgaacggc tggagcggga tgctaaggcg gcacacgagg ctggcctggc | 900 |
| atttggggtg aagttggtga gaggtgccta tctggacaag gagagatccg tgacacagct | 960 |
| ccacgggaag gaagactgta cccagcctga ctatgaggcc actagtcgga gttacagccg | 1020 |
| ctgtctggag ctgatgctgc gccgcgtgtc caaccacggt ccccggtgcc acctcatggt | 1080 |
| ggcttcccac aatgaagaat ccattcgcca ggcaacgagg cgcatgtggg agctgggcat | 1140 |
| tcctctggat gggcctgtct gcttcggaca acttctgggc atgtgtgacc acgtctccct | 1200 |
| ggcattaggg caagctggat acatggtata taagtctatc ccctatggct gcctggaaga | 1260 |
| ggtgataccc tacctgatcc gaagagccca ggagaacagg agtgtgctgc agggcgcccg | 1320 |
| gagggagcag gcactactca gccaagaact gtggcggagg ctgctgggaa ggaaagccta | 1380 |
| aggtttctcc gtcagcacca tcaggggccg tgtgctcaat aaaggtcctt agccctaaaa | 1440 |
| aaaaaaaaaa aaaaaaaaaa aaaaaa | 1466 |

| | |
|---|---|
| <210> | 6 |
| <211> | 1466 |
| <212> | DNA |
| <213> | Rattus norvegicus |
| <400> | 6 |

| | |
|---|---|
| tttttttttt tttttttttt tttttttttt agggctaagg acctttattg agcacacggc | 60 |
| ccctgatggt gctgacggag aaaccttagg ctttccttcc cagcagcctc cgccacagtt | 120 |
| cttggctgag tagtgcctgc tcccccggg cgccctgcag cacactcctg ttctcctggg | 180 |
| ctcttcggat caggtagggt atcacctctt ccaggcagcc ataggggata gacttatata | 240 |
| ccatgtatcc agcttgccct aatgccaggg agacgtggtc acacatgccc agaagttgtc | 300 |
| cgaagcagac aggcccatcc agaggaatgc ccagctccca catgcgcctc gttgcctggc | 360 |
| gaatggattc ttcattgtgg gaagccacca tgaggtggca ccggggaccg tggttggaca | 420 |
| cgcggcgcag catcagctcc agacagcggc tgtaactccg actagtggcc tcatagtcag | 480 |
| gctgggtaca gtcttccttc ccgtggagct gtgtcacgga tctctccttg tccagatagg | 540 |
| cacctctcac caacttcacc ccaaatgcca ggccagcctc gtgtgccgcc ttagcatccc | 600 |
| gctccagccg ttcgtgagtg tccttcagat aggcctggta agtgttccac acccacgggc | 660 |
| cctcttcctc cgagctgttc cagcgcatag ccagggcagc caccagcagg gacagggcag | 720 |
| ggttgatgaa cgtgtattca gcgtccacca gcagcctcac atcctgcgcc cgggcgtgct | 780 |
| gtgccactcg gtgcaagcgg ctgagggagg cctgcaggtg ttgattctgt tccgtgctga | 840 |
| ggcaggagag ctggaggttc cgacctgact ccatggcttc tgccagcctc tcaggcctca | 900 |
| gctccgagga gcctcttggt ctttggatcc aagccgatag ctccttacaa agccgagggc | 960 |
| tggttagcgc ggtcaccttc agctgcatga ggctgttcct ggctgggcca tgggcgtctg | 1020 |
| cgacagctcg tgacaagtcc acacagtgca gcatggcgct aaggttcccc tcataccaag | 1080 |
| cttcactggt cttggcagcg gagtctggtt cctcctcggt gggcactgcc aacaggggct | 1140 |
| ggagtcctat cgcctgcagc tgctggacac agcccctcac ttcctctgct gtctccccgg | 1200 |
| ccacaaactg tccatagatg gatgctcgga gaagtgcgcc cgagagccga gatcccagga | 1260 |
| gtcgctgaga ccaggcctga aacgctagtc catgagtgac caaagggggc caggcgcata | 1320 |
| ggcgaagcac cagcaaagcc cgtgccagtt ctgcggttct cttgagatgg aaggccccac | 1380 |
| catcaaagcg caggggctgc cagccacctg tagagggctt ggagtggccg tacagcggca | 1440 |
| gacgcgtcca gaccattgta agtgcc | 1466 |

| | |
|---|---|
| <210> | 7 |
| <211> | 1636 |
| <212> | DNA |
| <213> | Macaca fascicularis |
| <400> | 7 |

| | |
|---|---|
| ttattggggg ttcgcctccc gttaccgtta ctctgaactc tgtccccatt tgttaataat | 60 |
| taattgccct caaggaggga gcctgtgatc ctgaggcttt gcccagttaa tcagtcactg | 120 |
| cccccagtct gggcaagggg cacttggtga acctgctgcc tccagagcac cttccctggt | 180 |
| gtggaggcag ccagggaccc aggatgctct ggacctgtta cccgctctgt tcccaagctg | 240 |
| gtcccctggc aaggggctgg cagcccctga gctttgatgg tggcgccttc cacctcaagg | 300 |
| gcacaggaga gctgacacgg gccttgctgg ttctccggct gtgtgcctgg cccccactcg | 360 |
| tcactcacgg gctggcgctc caggcctggt ctcagcgact cctgggctcc cggctctcag | 420 |
| gcgcgtttct ccgagcatct gtctatgggc agtttgtggc tggtgagacg gcagaggagg | 480 |
| tgaggggctg cgtgcagcag ctgcggaccc tcagcctccg accactgctg gcagtgccca | 540 |
| ctgaggagga gccggactct gctgccaaga gcggtgaggc ctggtatgag gggaacctcg | 600 |
| gtgctatgct gcggtgtgtg gacctgtcga ggaacctcct ggagcccccc agcctggctg | 660 |
| aggccagcct catgcagctg aaggtgacgg cgttgaccag cgctcggctc tgtaaggagc | 720 |
| tagcctcatg ggtcagaagg ccaggagctc ccttggagct gagccccgag aggctggctg | 780 |
| aagccatgga ctctgggcag aacctccagg tctcctgcct caacgatgag cagaaccagc | 840 |
| acctccaggc ctccctcagc cgcttgcatc gggtggccca gtatgcccgg gcccagcacg | 900 |
| tgcggctcct ggtggatgcg gagtacacct cactgaaccc tgcgctctcg ctgctggtgg | 960 |
| ctgccctggc cgtgcgctgg aacagcccag aggaaggcgg gccctgggtg tggaacacct | 1020 |
| accaggcctg tctaaaggac acattcgagc ggctggggag ggacgcagag gctgcacaca | 1080 |
| gggccggcct ggccttcgga gtgaagctgg tacgaggtgc ctatctggac aaggagagag | 1140 |
| cggtggccca gcttcatggg atgaaggacc ccactcagcc tgactatgag gccaccagtc | 1200 |
| agagttacag ccgctgcctg gaactgatgc tgacgcgtgt ggcccgccat ggccccatgt | 1260 |
| gccacctcat ggtggcttcc cacaatgagg aatctgttcg ccaggcaacc aagcgcatgt | 1320 |
| gggagctggg cattcctctg gacgggactg tctgttttgg acaacttctg ggcatgtgtg | 1380 |
| accacgtctc tctggcactg gggcaggccg gctatgtagt gtataagtcc atcccctatg | 1440 |
| gctccttgga ggaggtaatc ccctacctga tccggagggc ccaggaaaac cggagcgtgc | 1500 |
| ttcagggtgt ccgcagggaa caggagctgc tcagccaaga actgtggcgg cggctgctgc | 1560 |
| caggacgccg aaggataccc cactagcacc cctgaggggg tcatgtggtc aataaaagtc | 1620 |
| cttaggcact gccaaa | 1636 |

| | |
|---|---|
| <210> | 8 |
| <211> | 1636 |
| <212> | DNA |
| <213> | Macaca fascicularis |
| <400> | 8 |

| | |
|---|---|
| tttggcagtg cctaaggact tttattgacc acatgacccc ctcaggggtg ctagtggggt | 60 |
| atccttcggc gtcctggcag cagccgccgc cacagttctt ggctgagcag ctcctgttcc | 120 |
| ctgcggacac cctgaagcac gctccggttt tcctgggccc tccggatcag gtaggggatt | 180 |
| acctcctcca aggagccata ggggatggac ttatacacta catagccggc ctgccccagt | 240 |
| gccagagaga cgtggtcaca catgcccaga agttgtccaa aacagacagt cccgtccaga | 300 |
| ggaatgccca gctcccacat gcgcttggtt gcctggcgaa cagattcctc attgtgggaa | 360 |
| gccaccatga ggtggcacat ggggccatgg cgggccacac gcgtcagcat cagttccagg | 420 |
| cagcggctgt aactctgact ggtggcctca tagtcaggct gagtggggtc cttcatccca | 480 |
| tgaagctggg ccaccgctct ctccttgtcc agataggcac ctcgtaccag cttcactccg | 540 |
| aaggccaggc cggccctgtg tgcagcctct gcgtccctcc ccagccgctc gaatgtgtcc | 600 |
| tttagacagg cctggtaggt gttccacacc cagggcccgc cttcctctgg gctgttccag | 660 |
| cgcacggcca gggcagccac cagcagcgag agcgcagggt tcagtgaggt gtactccgca | 720 |
| tccaccagga gccgcacgtg ctgggcccgg gcatactggg ccacccgatg caagcggctg | 780 |
| agggaggcct ggaggtgctg gttctgctca tcgttgaggc aggagacctg gaggttctgc | 840 |
| ccagagtcca tggcttcagc cagcctctcg gggctcagct ccaagggagc tcctggcctt | 900 |
| ctgacccatg aggctagctc cttacagagc cgagcgctgg tcaacgccgt caccttcagc | 960 |
| tgcatgaggc tggcctcagc caggctgggg ggctccagga ggttcctcga caggtccaca | 1020 |
| caccgcagca tagcaccgag gttcccctca taccaggcct caccgctctt ggcagcagag | 1080 |
| tccggctcct cctcagtggg cactgccagc agtggtcgga ggctgagggt ccgcagctgc | 1140 |
| tgcacgcagc ccctcacctc ctctgccgtc tcaccagcca caaactgccc atagacagat | 1200 |
| gctcggagaa acgcgcctga gagccgggag cccaggagtc gctgagacca ggcctggagc | 1260 |
| gccagcccgt gagtgacgag tgggggccag gcacacagcc ggagaaccag caaggcccgt | 1320 |
| gtcagctctc ctgtgccctt gaggtggaag gcgccaccat caaagctcag gggctgccag | 1380 |
| ccccttgcca ggggaccagc ttgggaacag agcgggtaac aggtccagag catcctgggt | 1440 |
| ccctggctgc ctccacacca gggaaggtgc tctggaggca gcaggttcac caagtgcccc | 1500 |
| ttgcccagac tgggggcagt gactgattaa ctgggcaaag cctcaggatc acaggctccc | 1560 |
| tccttgaggg caattaatta ttaacaaatg gggacagagt tcagagtaac ggtaacggga | 1620 |
| ggcgaacccc caataa | 1636 |

| | |
|---|---|
| <210> | 9 |
| <211> | 1825 |
| <212> | DNA |
| <213> | Macaca mulatta |
| <400> | 9 |

| | |
|---|---|
| cacgcaccta taatcccagc tacttgggag ggggaggaag caattgccac aaaagcggtt | 60 |
| aagtagctcg tcctggatca caaagcccaa tgtcctgaac ccagggatcc ttgccccgga | 120 |
| gcccctgttt tccccagcac gtggtgatta cctagtaagt gcaggctgtt gtgctgagga | 180 |
| ttgttggggg ctgttattgg gggttcgcct cccgttaccg ttactctgaa ctctgtcccc | 240 |
| atttgttaat aattaattgc cctcaaggag cctgtgatcc tgaggctttg cccagttaat | 300 |
| cagtcactgc ccccagtctg ggcaaggggc acttggtgaa cctgctgcct ccagagcacc | 360 |
| ttccctggtg tggaggcagc cagggaccca ggatgctctg gacctgttac ccgctctgtt | 420 |
| cccaagctgg tcccctggcg aggggctggc agcccctgag ctttgatggt ggcgccttcc | 480 |
| acctcaaggg cacaggagag ctgacacggg ccttgctggt tctccggctg tgtgcctggc | 540 |
| ccccactcgt cactcatggg ctggcgctcc aggcctggtc tcagcgactc ctgggctccc | 600 |
| ggctctcagg cgcgtttctc cgagcatctg tctatgggca gtttgtggct ggtgagacgg | 660 |
| cagaggaggt gaggggctgc gtgcagcagc tgcggaccct cagcctccga ccactgctgg | 720 |
| cagtgcccac tgaggaggag ccggactctg ctgccaagag cggtgaggcc tggtatgagg | 780 |
| ggaacctcgg tgctatgctg cggtgtgtgg acctgtcgcg ggacctcctg gagcccccca | 840 |
| gcctggctga ggccagcctc atgcagctga aggtgacggc gttgaccagc gctcggctct | 900 |
| gtaaggagct agcctcatgg atcagaaggc caggagctcc cttggagctg agccccgaga | 960 |
| ggctggctga agccatggac tctgggcaga acctccaggt ctcctgcctc aacgatgagc | 1020 |
| agaaccagca cctccaggcc tccctcagcc gcttgcatcg ggtggcccag tatgcccggg | 1080 |
| cccagcacgt acggctcctg gtggatgcgg agtacacctc actgaaccct gcgctctcgc | 1140 |
| tgctggtggc tgccctggcc gtgcgctgga acagcccagg ggaaggcggg ccctgggtgt | 1200 |
| ggaacaccta ccaggcctgt ctaaaggaca cattcgagcg gctggggagg gacgcagagg | 1260 |
| ctgcacacag ggccggcctg gccttcggag tgaagctggt acgaggtgcc tatctggaca | 1320 |
| aggagagagc ggtggcccag cttcatggga tgaaggaccc cactcagcct gactatgagg | 1380 |
| ccaccagtca gagttacagc cgctgcctgg aactgatgct gacgcgtgtg gcccgccatg | 1440 |
| gccccatgtg ccacctcatg gtggcttccc acaatgagga atctgttcgc caggcaacca | 1500 |
| agcgcatgtg ggagctgggc attcctctgg acgggactgt ctgttttgga caacttctgg | 1560 |
| gcatgtgtga ccacgtttct ctggcactgg ggcaggccgg ctatgtagtg tataagtcca | 1620 |
| tcccctatgg ctccttggag gaggtaatcc cctacctgat ccggagggcc caggaaaacc | 1680 |
| ggagcgtgct tcagggtgtc cgcagggaac aggagctgct cagccaagaa ctgtggcggc | 1740 |
| ggctgctgcc aggacgccga aggatacccc actagcaccc ctgagggggt catgtggtca | 1800 |
| ataaaagtcc ttaggcactg ccaaa | 1825 |

| | |
|---|---|
| <210> | 10 |
| <211> | 1825 |
| <212> | DNA |
| <213> | Macaca mulatta |
| <400> | 10 |

| | |
|---|---|
| tttggcagtg cctaaggact tttattgacc acatgacccc ctcaggggtg ctagtggggt | 60 |
| atccttcggc gtcctggcag cagccgccgc cacagttctt ggctgagcag ctcctgttcc | 120 |
| ctgcggacac cctgaagcac gctccggttt tcctgggccc tccggatcag gtaggggatt | 180 |
| acctcctcca aggagccata ggggatggac ttatacacta catagccggc ctgccccagt | 240 |
| gccagagaaa cgtggtcaca catgcccaga agttgtccaa aacagacagt cccgtccaga | 300 |
| ggaatgccca gctcccacat gcgcttggtt gcctggcgaa cagattcctc attgtgggaa | 360 |
| gccaccatga ggtggcacat ggggccatgg cgggccacac gcgtcagcat cagttccagg | 420 |
| cagcggctgt aactctgact ggtggcctca tagtcaggct gagtggggtc cttcatccca | 480 |
| tgaagctggg ccaccgctct ctccttgtcc agataggcac ctcgtaccag cttcactccg | 540 |
| aaggccaggc cggccctgtg tgcagcctct gcgtccctcc ccagccgctc gaatgtgtcc | 600 |
| tttagacagg cctggtaggt gttccacacc cagggcccgc cttcccctgg gctgttccag | 660 |
| cgcacggcca gggcagccac cagcagcgag agcgcagggt tcagtgaggt gtactccgca | 720 |
| tccaccagga gccgtacgtg ctgggcccgg gcatactggg ccacccgatg caagcggctg | 780 |
| agggaggcct ggaggtgctg gttctgctca tcgttgaggc aggagacctg gaggttctgc | 840 |
| ccagagtcca tggcttcagc cagcctctcg gggctcagct ccaagggagc tcctggcctt | 900 |
| ctgatccatg aggctagctc cttacagagc cgagcgctgg tcaacgccgt caccttcagc | 960 |
| tgcatgaggc tggcctcagc caggctgggg ggctccagga ggtcccgcga caggtccaca | 1020 |
| caccgcagca tagcaccgag gttcccctca taccaggcct caccgctctt ggcagcagag | 1080 |
| tccggctcct cctcagtggg cactgccagc agtggtcgga ggctgagggt ccgcagctgc | 1140 |
| tgcacgcagc ccctcacctc ctctgccgtc tcaccagcca caaactgccc atagacagat | 1200 |
| gctcggagaa acgcgcctga gagccgggag cccaggagtc gctgagacca ggcctggagc | 1260 |
| gccagcccat gagtgacgag tgggggccag gcacacagcc ggagaaccag caaggcccgt | 1320 |
| gtcagctctc ctgtgccctt gaggtggaag gcgccaccat caaagctcag gggctgccag | 1380 |
| cccctcgcca ggggaccagc ttgggaacag agcgggtaac aggtccagag catcctgggt | 1440 |
| ccctggctgc ctccacacca gggaaggtgc tctggaggca gcaggttcac caagtgcccc | 1500 |
| ttgcccagac tgggggcagt gactgattaa ctgggcaaag cctcaggatc acaggctcct | 1560 |
| tgagggcaat taattattaa caaatgggga cagagttcag agtaacggta acgggaggcg | 1620 |
| aacccccaat aacagccccc aacaatcctc agcacaacag cctgcactta ctaggtaatc | 1680 |
| accacgtgct ggggaaaaca ggggctccgg ggcaaggatc cctgggttca ggacattggg | 1740 |
| ctttgtgatc caggacgagc tacttaaccg cttttgtggc aattgcttcc tccccctccc | 1800 |
| aagtagctgg gattataggt gcgtg | 1825 |

### EQUIVALENTS

[0698] Those skilled in the art will recognize, or be able to ascertain using no more than routine experimentation, many equivalents to the specific embodiments and methods described herein. Such equivalents are intended to be encompassed by the scope of the following claims.

The application's sequence listing, which the Patent Office published only in electronic form, follows.

SEQUENCE LISTING (694 sequences)

SEQ ID NO: 1 - DNA, 1473 bp, Homo sapiens
  source 1..1473: mol_type = genomic DNA
agagaaccttccctggtgtggaggcagccagggacccaggatgctccggacctgttacgtgctctgttcccaagctggtcccccctccaggggctggcagtccctgagctttgatggcggggccttccaccttaagggcacaggagagctgacacgggccttgctggttctccggctgtgtgcctggcccccactcgtcactcacgggctgttgctccaggcctggtctcggcgactcctgggctcccggctctcaggcgcatttctccgagcatccgtctatgggcagtttgtggctggtgagacagcagaggaggtgaagggctgcgtgcagcagctgcggaccctcagcctccgaccactgctggcagtgcccactgaggaggagccggactctgctgccaagagtggtgaggcgtggtatgaggggaacctcggtgctatgctgcggtgtgtggacctgtcacggggcctcctggagccccccagcctggctgaggccagcctcatgcagctgaaggtgacggcgctgaccagtactcggctctgtaaggagctagcctcgtgggtcagaaggccaggagcctccttggagctgagccccgagaggctggctgaagctatggactctgggcagaacctccaggtctcctgcctcaatgctgagcagaaccagcacctccgggcctccctcagccgcctgcatcgggtggcacagtatgcccgggcccagcacgtgcggctcctggtggatgcggagtacacctcactgaaccctgcgctctcgctgctggtggctgccctggctgtgcgctggaacagcccgggtgaaggcgggccctgggtgtggaacacctaccaggcctgtctaaaggacacattcgagcggctggggagggatgcagaggctgcgcacagggccggcctggccttcggagtgaagctggtacgaggtgcatatctggacaaggagagagcggtggcccagctccatgggatggaagaccccactcagcctgactatgaggccaccagtcagagttacagccgctgcctggaactgatgctgacgcacgtggcccgccatggccccatgtgccacctcatggtggcttcccacaatgaggaatctgttcgccaggcaaccaagcgcatgtgggagctgggcattcctctggatgggactgtctgtttcggacaacttctgggcatgtgtgaccacgtctctctagcactggggcaggccggctatgtagtgtataagtccattccctatggctccttggaggaggtaatcccctacctgatccggagggcccaggagaaccggagcgtgcttcagggtgcccgcagggaacaggagctgctcagccaagaactgtggcggcggctgctgccaggatgccgaaggataccccactagcacccctgagggggtcatgtggtcaataaaagtccttaggtgctgcctaa

SEQ ID NO: 2 - DNA, 1473 bp, Homo sapiens
  source 1..1473: mol_type = genomic DNA
ttaggcagcacctaaggacttttattgaccacatgaccccctcaggggtgctagtggggtatccttcggcatcctggcagcagccgccgccacagttcttggctgagcagctcctgttccctgcgggcaccctgaagcacgctccggttctcctgggccctccggatcaggtaggggattacctcctccaaggagccatagggaatggacttatacactacatagccggcctgccccagtgctagagagacgtggtcacacatgcccagaagttgtccgaaacagacagtcccatccagaggaatgcccagctcccacatgcgcttggttgcctggcgaacagattcctcattgtgggaagccaccatgaggtggcacatggggccatggcgggccacgtgcgtcagcatcagttccaggcagcggctgtaactctgactggtggcctcatagtcaggctgagtggggtcttccatcccatggagctgggccaccgctctctccttgtccagatatgcacctcgtaccagcttcactccgaaggccaggccggccctgtgcgcagcctctgcatccctccccagccgctcgaatgtgtcctttagacaggcctggtaggtgttccacacccagggcccgccttcacccgggctgttccagcgcacagccagggcagccaccagcagcgagagcgcagggttcagtgaggtgtactccgcatccaccaggagccgcacgtgctgggcccgggcatactgtgccacccgatgcaggcggctgagggaggcccggaggtgctggttctgctcagcattgaggcaggagacctggaggttctgcccagagtccatagcttcagccagcctctcggggctcagctccaaggaggctcctggccttctgacccacgaggctagctccttacagagccgagtactggtcagcgccgtcaccttcagctgcatgaggctggcctcagccaggctggggggctccaggaggccccgtgacaggtccacacaccgcagcatagcaccgaggttcccctcataccacgcctcaccactcttggcagcagagtccggctcctcctcagtgggcactgccagcagtggtcggaggctgagggtccgcagctgctgcacgcagcccttcacctcctctgctgtctcaccagccacaaactgcccatagacggatgctcggagaaatgcgcctgagagccgggagcccaggagtcgccgagaccaggcctggagcaacagcccgtgagtgacgagtgggggccaggcacacagccggagaaccagcaaggcccgtgtcagctctcctgtgcccttaaggtggaaggccccgccatcaaagctcagggactgccagcccctggaggggggaccagcttgggaacagagcacgtaacaggtccggagcatcctgggtccctggctgcctccacaccagggaaggttctct

SEQ ID NO: 3 - DNA, 1817 bp, Mus musculus
  source 1..1817: mol_type = genomic DNA
agtgtggtggtaaccaggcacttgcaatgatctggacgcgtctgccgctgtatggcccctccaagccctctacaggtggctggcagcccctgcgctttgatggtggggccttccatgtcaagggaaccgcagaactggcacgggctttgctagtgcttcgcctatgcgcctggccccctttggtcactcatggactagcgtttcaggcctggtctcagcgactcctgggatcccggctctcaggcgcacttcttcgagcatccatctacgggcagtttgtggccggggagacagcagaggaagtgaggaactgtgtcgggcagctgcaggccctgggactccagcccctgttggcagtacccaccgaggaggaaccagactccactgccaagaccagtgaggtctggtatgaggagaaccttagcgccatgctgcgctgtgtggacttatcccgagccctcgtggacgcccacggcccagccaggaacagcctcatgcagctgaaggtgaccgcgctagccagcactcggctttgtaaagagctgtcggcttggatccaaagacccagaggctcctcggagctgagccctgagaggctggcagaagccatggactcgggtcggaacctccagctctcctgcctcagcacagaacagaatcagcacctgcaggcctccctcagccgcttgcaccgagtggcacagcacgcccgggcgaagtgtgtgcggctgctggtagatgctgaatatactttcattaaccctgcactgtccctgctggtggctgccctggctgtgcgctggaacagccctgaggaaggtggtccgtgggtgtggaacacttaccaggcctatctaaaggacactcaccaacggctggagcaggacgccgaggcagcacacaaggctggcctggcatttggggtgaagttggtgcgaggtgcctatctggacaaggagagatccatgacacagctccaagggaaggaagactgtacccagcctgactatgaggccactagtcggagttacagccgctgtctagagctgatgctgcgctgcgtgtcgaaccacggtcccccgtgtcacctcatggtggcttcccacaatgaagaatccgttcgccaggcaactaagcgcatgtgggagctgggcattcctctggatgggcctgtctgttttggacaacttctgggcatgtgtgaccatgtctccctggcattagggcaggctggatatatggtgtacaagtctattccctatggctgcctggaggaggtgattccctacctgatccgaagagcccaggagaacaggagtgtgctgcagggtgcccgcagggagcaggcactactcagccaggaactgtggcggagactgctgggaaggacggcctaagatgtctccatcagcaccatcaggggccatgtgctcaataaaggtcccgagtcctggccctgtctgtacttctcagaagctgcctccttggggaaagggctgaccctggtgtctgctcggacaggtggggcatgcctgagactcaagagatctttagtcctgtgtggtggcacactcctgttatcctagcacttgggaggctgagacaggagggccatgtgttccaagccagcctggactacagagtgagaagaaggaagaggaggagtgggagaggggaggggaggagaagtgctagcctagggtggtagtgacttggtaaccgaagggtaattaatccttcaatgtgcttagccagggatctagtcaagaattctttccctctcagaggatttgtaataaacaacacaggtgaatagc

SEQ ID NO: 4 - DNA, 1817 bp, Mus musculus
  source 1..1817: mol_type = genomic DNA
gctattcacctgtgttgtttattacaaatcctctgagagggaaagaattcttgactagatccctggctaagcacattgaaggattaattacccttcggttaccaagtcactaccaccctaggctagcacttctcctcccctcccctctcccactcctcctcttccttcttctcactctgtagtccaggctggcttggaacacatggccctcctgtctcagcctcccaagtgctaggataacaggagtgtgccaccacacaggactaaagatctcttgagtctcaggcatgccccacctgtccgagcagacaccagggtcagccctttccccaaggaggcagcttctgagaagtacagacagggccaggactcgggacctttattgagcacatggcccctgatggtgctgatggagacatcttaggccgtccttcccagcagtctccgccacagttcctggctgagtagtgcctgctccctgcgggcaccctgcagcacactcctgttctcctgggctcttcggatcaggtagggaatcacctcctccaggcagccatagggaatagacttgtacaccatatatccagcctgccctaatgccagggagacatggtcacacatgcccagaagttgtccaaaacagacaggcccatccagaggaatgcccagctcccacatgcgcttagttgcctggcgaacggattcttcattgtgggaagccaccatgaggtgacacgggggaccgtggttcgacacgcagcgcagcatcagctctagacagcggctgtaactccgactagtggcctcatagtcaggctgggtacagtcttccttcccttggagctgtgtcatggatctctccttgtccagataggcacctcgcaccaacttcaccccaaatgccaggccagccttgtgtgctgcctcggcgtcctgctccagccgttggtgagtgtcctttagataggcctggtaagtgttccacacccacggaccaccttcctcagggctgttccagcgcacagccagggcagccaccagcagggacagtgcagggttaatgaaagtatattcagcatctaccagcagccgcacacacttcgcccgggcgtgctgtgccactcggtgcaagcggctgagggaggcctgcaggtgctgattctgttctgtgctgaggcaggagagctggaggttccgacccgagtccatggcttctgccagcctctcagggctcagctccgaggagcctctgggtctttggatccaagccgacagctctttacaaagccgagtgctggctagcgcggtcaccttcagctgcatgaggctgttcctggctgggccgtgggcgtccacgagggctcgggataagtccacacagcgcagcatggcgctaaggttctcctcataccagacctcactggtcttggcagtggagtctggttcctcctcggtgggtactgccaacaggggctggagtcccagggcctgcagctgcccgacacagttcctcacttcctctgctgtctccccggccacaaactgcccgtagatggatgctcgaagaagtgcgcctgagagccgggatcccaggagtcgctgagaccaggcctgaaacgctagtccatgagtgaccaaagggggccaggcgcataggcgaagcactagcaaagcccgtgccagttctgcggttcccttgacatggaaggccccaccatcaaagcgcaggggctgccagccacctgtagagggcttggaggggccatacagcggcagacgcgtccagatcattgcaagtgcctggttaccaccacact

SEQ ID NO: 5 - DNA, 1466 bp, Rattus norvegicus
  source 1..1466: mol_type = genomic DNA
ggcacttacaatggtctggacgcgtctgccgctgtacggccactccaagccctctacaggtggctggcagcccctgcgctttgatggtggggccttccatctcaagagaaccgcagaactggcacgggctttgctggtgcttcgcctatgcgcctggccccctttggtcactcatggactagcgtttcaggcctggtctcagcgactcctgggatctcggctctcgggcgcacttctccgagcatccatctatggacagtttgtggccggggagacagcagaggaagtgaggggctgtgtccagcagctgcaggcgataggactccagcccctgttggcagtgcccaccgaggaggaaccagactccgctgccaagaccagtgaagcttggtatgaggggaaccttagcgccatgctgcactgtgtggacttgtcacgagctgtcgcagacgcccatggcccagccaggaacagcctcatgcagctgaaggtgaccgcgctaaccagccctcggctttgtaaggagctatcggcttggatccaaagaccaagaggctcctcggagctgaggcctgagaggctggcagaagccatggagtcaggtcggaacctccagctctcctgcctcagcacggaacagaatcaacacctgcaggcctccctcagccgcttgcaccgagtggcacagcacgcccgggcgcaggatgtgaggctgctggtggacgctgaatacacgttcatcaaccctgccctgtccctgctggtggctgccctggctatgcgctggaacagctcggaggaagagggcccgtgggtgtggaacacttaccaggcctatctgaaggacactcacgaacggctggagcgggatgctaaggcggcacacgaggctggcctggcatttggggtgaagttggtgagaggtgcctatctggacaaggagagatccgtgacacagctccacgggaaggaagactgtacccagcctgactatgaggccactagtcggagttacagccgctgtctggagctgatgctgcgccgcgtgtccaaccacggtccccggtgccacctcatggtggcttcccacaatgaagaatccattcgccaggcaacgaggcgcatgtgggagctgggcattcctctggatgggcctgtctgcttcggacaacttctgggcatgtgtgaccacgtctccctggcattagggcaagctggatacatggtatataagtctatcccctatggctgcctggaagaggtgataccctacctgatccgaagagcccaggagaacaggagtgtgctgcagggcgcccggagggagcaggcactactcagccaagaactgtggcggaggctgctgggaaggaaagcctaaggtttctccgtcagcaccatcaggggccgtgtgctcaataaaggtccttagccctaaaaaaaaaaaaaaaaaaaaaaaaaaaaaa

SEQ ID NO: 6 - DNA, 1466 bp, Rattus norvegicus
  source 1..1466: mol_type = genomic DNA
ttttttttttttttttttttttttttttttagggctaaggacctttattgagcacacggcccctgatggtgctgacggagaaaccttaggctttccttcccagcagcctccgccacagttcttggctgagtagtgcctgctccctccgggcgccctgcagcacactcctgttctcctgggctcttcggatcaggtagggtatcacctcttccaggcagccataggggatagacttatataccatgtatccagcttgccctaatgccagggagacgtggtcacacatgcccagaagttgtccgaagcagacaggcccatccagaggaatgcccagctcccacatgcgcctcgttgcctggcgaatggattcttcattgtgggaagccaccatgaggtggcaccggggaccgtggttggacacgcggcgcagcatcagctccagacagcggctgtaactccgactagtggcctcatagtcaggctgggtacagtcttccttcccgtggagctgtgtcacggatctctccttgtccagataggcacctctcaccaacttcaccccaaatgccaggccagcctcgtgtgccgccttagcatcccgctccagccgttcgtgagtgtccttcagataggcctggtaagtgttccacacccacgggccctcttcctccgagctgttccagcgcatagccagggcagccaccagcagggacagggcagggttgatgaacgtgtattcagcgtccaccagcagcctcacatcctgcgcccgggcgtgctgtgccactcggtgcaagcggctgagggaggcctgcaggtgttgattctgttccgtgctgaggcaggagagctggaggttccgacctgactccatggcttctgccagcctctcaggcctcagctccgaggagcctcttggtctttggatccaagccgatagctccttacaaagccgagggctggttagcgcggtcaccttcagctgcatgaggctgttcctggctgggccatgggcgtctgcgacagctcgtgacaagtccacacagtgcagcatggcgctaaggttcccctcataccaagcttcactggtcttggcagcggagtctggttcctcctcggtgggcactgccaacaggggctggagtcctatcgcctgcagctgctggacacagcccctcacttcctctgctgtctccccggccacaaactgtccatagatggatgctcggagaagtgcgcccgagagccgagatcccaggagtcgctgagaccaggcctgaaacgctagtccatgagtgaccaaagggggccaggcgcataggcgaagcaccagcaaagcccgtgccagttctgcggttctcttgagatggaaggccccaccatcaaagcgcaggggctgccagccacctgtagagggcttggagtggccgtacagcggcagacgcgtccagaccattgtaagtgcc

SEQ ID NO: 7 - DNA, 1636 bp, Macaca fascicularis
  source 1..1636: mol_type = genomic DNA
ttattgggggttcgcctcccgttaccgttactctgaactctgtccccatttgttaataattaattgccctcaaggagggagcctgtgatcctgaggctttgcccagttaatcagtcactgcccccagtctgggcaaggggcacttggtgaacctgctgcctccagagcaccttccctggtgtggaggcagccagggacccaggatgctctggacctgttacccgctctgttcccaagctggtcccctggcaaggggctggcagcccctgagctttgatggtggcgccttccacctcaagggcacaggagagctgacacgggccttgctggttctccggctgtgtgcctggcccccactcgtcactcacgggctggcgctccaggcctggtctcagcgactcctgggctcccggctctcaggcgcgtttctccgagcatctgtctatgggcagtttgtggctggtgagacggcagaggaggtgaggggctgcgtgcagcagctgcggaccctcagcctccgaccactgctggcagtgcccactgaggaggagccggactctgctgccaagagcggtgaggcctggtatgaggggaacctcggtgctatgctgcggtgtgtggacctgtcgaggaacctcctggagccccccagcctggctgaggccagcctcatgcagctgaaggtgacggcgttgaccagcgctcggctctgtaaggagctagcctcatgggtcagaaggccaggagctcccttggagctgagccccgagaggctggctgaagccatggactctgggcagaacctccaggtctcctgcctcaacgatgagcagaaccagcacctccaggcctccctcagccgcttgcatcgggtggcccagtatgcccgggcccagcacgtgcggctcctggtggatgcggagtacacctcactgaaccctgcgctctcgctgctggtggctgccctggccgtgcgctggaacagcccagaggaaggcgggccctgggtgtggaacacctaccaggcctgtctaaaggacacattcgagcggctggggagggacgcagaggctgcacacagggccggcctggccttcggagtgaagctggtacgaggtgcctatctggacaaggagagagcggtggcccagcttcatgggatgaaggaccccactcagcctgactatgaggccaccagtcagagttacagccgctgcctggaactgatgctgacgcgtgtggcccgccatggccccatgtgccacctcatggtggcttcccacaatgaggaatctgttcgccaggcaaccaagcgcatgtgggagctgggcattcctctggacgggactgtctgttttggacaacttctgggcatgtgtgaccacgtctctctggcactggggcaggccggctatgtagtgtataagtccatcccctatggctccttggaggaggtaatcccctacctgatccggagggcccaggaaaaccggagcgtgcttcagggtgtccgcagggaacaggagctgctcagccaagaactgtggcggcggctgctgccaggacgccgaaggataccccactagcacccctgagggggtcatgtggtcaataaaagtccttaggcactgccaaa

SEQ ID NO: 8 - DNA, 1636 bp, Macaca fascicularis
  source 1..1636: mol_type = genomic DNA
tttggcagtgcctaaggacttttattgaccacatgaccccctcaggggtgctagtggggtatccttcggcgtcctggcagcagccgccgccacagttcttggctgagcagctcctgttccctgcggacaccctgaagcacgctccggttttcctgggccctccggatcaggtaggggattacctcctccaaggagccataggggatggacttatacactacatagccggcctgccccagtgccagagagacgtggtcacacatgcccagaagttgtccaaaacagacagtcccgtccagaggaatgcccagctcccacatgcgcttggttgcctggcgaacagattcctcattgtgggaagccaccatgaggtggcacatggggccatggcgggccacacgcgtcagcatcagttccaggcagcggctgtaactctgactggtggcctcatagtcaggctgagtggggtccttcatcccatgaagctgggccaccgctctctccttgtccagataggcacctcgtaccagcttcactccgaaggccaggccggccctgtgtgcagcctctgcgtccctccccagccgctcgaatgtgtcctttagacaggcctggtaggtgttccacacccagggcccgccttcctctgggctgttccagcgcacggccagggcagccaccagcagcgagagcgcagggttcagtgaggtgtactccgcatccaccaggagccgcacgtgctgggcccgggcatactgggccacccgatgcaagcggctgagggaggcctggaggtgctggttctgctcatcgttgaggcaggagacctggaggttctgcccagagtccatggcttcagccagcctctcggggctcagctccaagggagctcctggccttctgacccatgaggctagctccttacagagccgagcgctggtcaacgccgtcaccttcagctgcatgaggctggcctcagccaggctggggggctccaggaggttcctcgacaggtccacacaccgcagcatagcaccgaggttcccctcataccaggcctcaccgctcttggcagcagagtccggctcctcctcagtgggcactgccagcagtggtcggaggctgagggtccgcagctgctgcacgcagcccctcacctcctctgccgtctcaccagccacaaactgcccatagacagatgctcggagaaacgcgcctgagagccgggagcccaggagtcgctgagaccaggcctggagcgccagcccgtgagtgacgagtgggggccaggcacacagccggagaaccagcaaggcccgtgtcagctctcctgtgcccttgaggtggaaggcgccaccatcaaagctcaggggctgccagccccttgccaggggaccagcttgggaacagagcgggtaacaggtccagagcatcctgggtccctggctgcctccacaccagggaaggtgctctggaggcagcaggttcaccaagtgccccttgcccagactgggggcagtgactgattaactgggcaaagcctcaggatcacaggctccctccttgagggcaattaattattaacaaatggggacagagttcagagtaacggtaacgggaggcgaacccccaataa

SEQ ID NO: 9 - DNA, 1825 bp, Macaca mulatta
  source 1..1825: mol_type = genomic DNA
cacgcacctataatcccagctacttgggagggggaggaagcaattgccacaaaagcggttaagtagctcgtcctggatcacaaagcccaatgtcctgaacccagggatccttgccccggagcccctgttttccccagcacgtggtgattacctagtaagtgcaggctgttgtgctgaggattgttgggggctgttattgggggttcgcctcccgttaccgttactctgaactctgtccccatttgttaataattaattgccctcaaggagcctgtgatcctgaggctttgcccagttaatcagtcactgcccccagtctgggcaaggggcacttggtgaacctgctgcctccagagcaccttccctggtgtggaggcagccagggacccaggatgctctggacctgttacccgctctgttcccaagctggtcccctggcgaggggctggcagcccctgagctttgatggtggcgccttccacctcaagggcacaggagagctgacacgggccttgctggttctccggctgtgtgcctggcccccactcgtcactcatgggctggcgctccaggcctggtctcagcgactcctgggctcccggctctcaggcgcgtttctccgagcatctgtctatgggcagtttgtggctggtgagacggcagaggaggtgaggggctgcgtgcagcagctgcggaccctcagcctccgaccactgctggcagtgcccactgaggaggagccggactctgctgccaagagcggtgaggcctggtatgaggggaacctcggtgctatgctgcggtgtgtggacctgtcgcgggacctcctggagccccccagcctggctgaggccagcctcatgcagctgaaggtgacggcgttgaccagcgctcggctctgtaaggagctagcctcatggatcagaaggccaggagctcccttggagctgagccccgagaggctggctgaagccatggactctgggcagaacctccaggtctcctgcctcaacgatgagcagaaccagcacctccaggcctccctcagccgcttgcatcgggtggcccagtatgcccgggcccagcacgtacggctcctggtggatgcggagtacacctcactgaaccctgcgctctcgctgctggtggctgccctggccgtgcgctggaacagcccaggggaaggcgggccctgggtgtggaacacctaccaggcctgtctaaaggacacattcgagcggctggggagggacgcagaggctgcacacagggccggcctggccttcggagtgaagctggtacgaggtgcctatctggacaaggagagagcggtggcccagcttcatgggatgaaggaccccactcagcctgactatgaggccaccagtcagagttacagccgctgcctggaactgatgctgacgcgtgtggcccgccatggccccatgtgccacctcatggtggcttcccacaatgaggaatctgttcgccaggcaaccaagcgcatgtgggagctgggcattcctctggacgggactgtctgttttggacaacttctgggcatgtgtgaccacgtttctctggcactggggcaggccggctatgtagtgtataagtccatcccctatggctccttggaggaggtaatcccctacctgatccggagggcccaggaaaaccggagcgtgcttcagggtgtccgcagggaacaggagctgctcagccaagaactgtggcggcggctgctgccaggacgccgaaggataccccactagcacccctgagggggtcatgtggtcaataaaagtccttaggcactgccaaa

SEQ ID NO: 10 - DNA, 1825 bp, Macaca mulatta
  source 1..1825: mol_type = genomic DNA
tttggcagtgcctaaggacttttattgaccacatgaccccctcaggggtgctagtggggtatccttcggcgtcctggcagcagccgccgccacagttcttggctgagcagctcctgttccctgcggacaccctgaagcacgctccggttttcctgggccctccggatcaggtaggggattacctcctccaaggagccataggggatggacttatacactacatagccggcctgccccagtgccagagaaacgtggtcacacatgcccagaagttgtccaaaacagacagtcccgtccagaggaatgcccagctcccacatgcgcttggttgcctggcgaacagattcctcattgtgggaagccaccatgaggtggcacatggggccatggcgggccacacgcgtcagcatcagttccaggcagcggctgtaactctgactggtggcctcatagtcaggctgagtggggtccttcatcccatgaagctgggccaccgctctctccttgtccagataggcacctcgtaccagcttcactccgaaggccaggccggccctgtgtgcagcctctgcgtccctccccagccgctcgaatgtgtcctttagacaggcctggtaggtgttccacacccagggcccgccttcccctgggctgttccagcgcacggccagggcagccaccagcagcgagagcgcagggttcagtgaggtgtactccgcatccaccaggagccgtacgtgctgggcccgggcatactgggccacccgatgcaagcggctgagggaggcctggaggtgctggttctgctcatcgttgaggcaggagacctggaggttctgcccagagtccatggcttcagccagcctctcggggctcagctccaagggagctcctggccttctgatccatgaggctagctccttacagagccgagcgctggtcaacgccgtcaccttcagctgcatgaggctggcctcagccaggctggggggctccaggaggtcccgcgacaggtccacacaccgcagcatagcaccgaggttcccctcataccaggcctcaccgctcttggcagcagagtccggctcctcctcagtgggcactgccagcagtggtcggaggctgagggtccgcagctgctgcacgcagcccctcacctcctctgccgtctcaccagccacaaactgcccatagacagatgctcggagaaacgcgcctgagagccgggagcccaggagtcgctgagaccaggcctggagcgccagcccatgagtgacgagtgggggccaggcacacagccggagaaccagcaaggcccgtgtcagctctcctgtgcccttgaggtggaaggcgccaccatcaaagctcaggggctgccagcccctcgccaggggaccagcttgggaacagagcgggtaacaggtccagagcatcctgggtccctggctgcctccacaccagggaaggtgctctggaggcagcaggttcaccaagtgccccttgcccagactgggggcagtgactgattaactgggcaaagcctcaggatcacaggctccttgagggcaattaattattaacaaatggggacagagttcagagtaacggtaacgggaggcgaacccccaataacagcccccaacaatcctcagcacaacagcctgcacttactaggtaatcaccacgtgctggggaaaacaggggctccggggcaaggatccctgggttcaggacattgggctttgtgatccaggacgagctacttaaccgcttttgtggcaattgcttcctccccctcccaagtagctgggattataggtgcgtg

SEQ ID NO: 11-13 - skipped (3 entries)

SEQ ID NO: 14 - protein, 16 aa, unidentified
  REGION 1..16: note = source = /note="Description of Unknown: RFGF peptide sequence"
AAVALLPAVLLALLAP

SEQ ID NO: 15 - protein, 11 aa, unidentified
  REGION 1..11: note = source = /note="Description of Unknown: RFGF analogue peptide sequence"
AALLPVLLAAP

SEQ ID NO: 16 - protein, 13 aa, Human immunodeficiency virus
GRKKRRQRRRPPQ

SEQ ID NO: 17 - protein, 16 aa, Drosophila sp.
RQIKIWFQNRRMKWKK

SEQ ID NO: 18 - DNA, 21 bp, synthetic construct
  source 1..21: mol_type = other DNA
  modified_base 1: mod_base = OTHER; note = 2'-O-methylcytidine-3'-phosphate
  modified_base 2: mod_base = OTHER; note = 2'-O-methyluridine-3'-phosphate
  modified_base 3: mod_base = OTHER; note = 2'-O-methyluridine-3'-phosphate
  modified_base 4: mod_base = OTHER; note = adenosine-3'-phosphate
  modified_base 5: mod_base = OTHER; note = 2'-O-methylcytidine-3'-phosphate
  modified_base 6: mod_base = OTHER; note = guanosine-3'-phosphate
  modified_base 7: mod_base = OTHER; note = 2'-O-methylcytidine-3'-phosphate
  modified_base 8: mod_base = OTHER; note = 2'-O-methyluridine-3'-phosphate
  modified_base 9: mod_base = OTHER; note = guanosine-3'-phosphate
  modified_base 10: mod_base = OTHER; note = adenosine-3'-phosphate
  modified_base 11: mod_base = OTHER; note = guanosine-3'-phosphate
  modified_base 12: mod_base = OTHER; note = 2'-O-methyluridine-3'-phosphate
  modified_base 13: mod_base = OTHER; note = adenosine-3'-phosphate
  modified_base 14: mod_base = OTHER; note = 2'-O-methylcytidine-3'-phosphate
  modified_base 15: mod_base = OTHER; note = 2'-O-methyluridine-3'-phosphate
  modified_base 16: mod_base = OTHER; note = 2'-O-methyluridine-3'-phosphate
  modified_base 17: mod_base = OTHER; note = 2'-O-methylcytidine-3'-phosphate
  modified_base 18: mod_base = OTHER; note = guanosine-3'-phosphate
  modified_base 19: mod_base = OTHER; note = adenosine-3'-phosphate
  modified_base 20: mod_base = OTHER; note = 2'-deoxythymidine-3'-phosphorothioate
  misc_feature 1..19: note = RNA
  misc_feature 20..21: note = DNA
cttacgctgagtacttcgatt

SEQ ID NO: 19 - DNA, 21 bp, synthetic construct
  source 1..21: mol_type = other DNA
  modified_base 1: mod_base = OTHER; note = uridine-3'-phosphate
  modified_base 2: mod_base = OTHER; note = cytidine-3'-phosphate
  modified_base 3: mod_base = OTHER; note = guanosine-3'-phosphate
  modified_base 4: mod_base = OTHER; note = adenosine-3'-phosphate
  modified_base 5: mod_base = OTHER; note = adenosine-3'-phosphate
  modified_base 6: mod_base = OTHER; note = guanosine-3'-phosphate
  modified_base 7: mod_base = OTHER; note = 2'-O-methyluridine-3'-phosphate
  modified_base 8: mod_base = OTHER; note = adenosine-3'-phosphate
  modified_base 9: mod_base = OTHER; note = cytidine-3'-phosphate
  modified_base 10: mod_base = OTHER; note = uridine-3'-phosphate
  modified_base 11: mod_base = OTHER; note = 2'-O-methylcytidine-3'-phosphate
  modified_base 12: mod_base = OTHER; note = adenosine-3'-phosphate
  modified_base 13: mod_base = OTHER; note = guanosine-3'-phosphate
  modified_base 14: mod_base = OTHER; note = cytidine-3'-phosphate
  modified_base 15: mod_base = OTHER; note = guanosine-3'-phosphate
  modified_base 16: mod_base = OTHER; note = 2'-O-methyluridine-3'-phosphate
  modified_base 17: mod_base = OTHER; note = adenosine-3'-phosphate
  modified_base 18: mod_base = OTHER; note = adenosine-3'-phosphate
  modified_base 19: mod_base = OTHER; note = guanosine-3'-phosphate
  modified_base 20: mod_base = OTHER; note = 2'-deoxythymidine-3'-phosphorothioate
  misc_feature 1..19: note = RNA
  misc_feature 20..21: note = DNA
tcgaagtactcagcgtaagtt

SEQ ID NO: 20 - RNA, 21 nt, synthetic construct
  source 1..21: mol_type = other RNA
agaaccttccctggtgtggat

SEQ ID NO: 21 - RNA, 21 nt, synthetic construct
  source 1..21: mol_type = other RNA
cttccctggtgtggaggcagt

SEQ ID NO: 22 - RNA, 21 nt, synthetic construct
  source 1..21: mol_type = other RNA
caggatgctccggacctgttt

SEQ ID NO: 23 - RNA, 21 nt, synthetic construct
  source 1..21: mol_type = other RNA
tgctccggacctgttacgtgt

SEQ ID NO: 24 - RNA, 21 nt, synthetic construct
  source 1..21: mol_type = other RNA
gacctgttacgtgctctgttt

SEQ ID NO: 25 - RNA, 21 nt, synthetic construct
  source 1..21: mol_type = other RNA
tacgtgctctgttcccaagct

SEQ ID NO: 26 - RNA, 21 nt, synthetic construct
  source 1..21: mol_type = other RNA
gctctgttcccaagctggtct

SEQ ID NO: 27 - RNA, 21 nt, synthetic construct
  source 1..21: mol_type = other RNA
ctggcagtccctgagctttgt

SEQ ID NO: 28 - RNA, 21 nt, synthetic construct
  source 1..21: mol_type = other RNA
gtccctgagctttgatggcgt

SEQ ID NO: 29 - RNA, 21 nt, synthetic construct
  source 1..21: mol_type = other RNA
gccttccaccttaagggcact

SEQ ID NO: 30 - RNA, 21 nt, synthetic construct
  source 1..21: mol_type = other RNA
caccttaagggcacaggagat

SEQ ID NO: 31 - RNA, 21 nt, synthetic construct
  source 1..21: mol_type = other RNA
gggcacaggagagctgacact

SEQ ID NO: 32 - RNA, 21 nt, synthetic construct
  source 1..21: mol_type = other RNA
ggagagctgacacgggccttt

SEQ ID NO: 33 - RNA, 21 nt, synthetic construct
  source 1..21: mol_type = other RNA
gacacgggccttgctggttct

SEQ ID NO: 34 - RNA, 21 nt, synthetic construct
  source 1..21: mol_type = other RNA
cttgctggttctccggctgtt

SEQ ID NO: 35 - RNA, 21 nt, synthetic construct
  source 1..21: mol_type = other RNA
ggttctccggctgtgtgcctt

SEQ ID NO: 36 - RNA, 21 nt, synthetic construct
  source 1..21: mol_type = other RNA
ctcgtcactcacgggctgttt

SEQ ID NO: 37 - RNA, 21 nt, synthetic construct
  source 1..21: mol_type = other RNA
ctcacgggctgttgctccagt

SEQ ID NO: 38 - RNA, 21 nt, synthetic construct
  source 1..21: mol_type = other RNA
ttgctccaggcctggtctcgt

SEQ ID NO: 39 - RNA, 21 nt, synthetic construct
  source 1..21: mol_type = other RNA
ggctctcaggcgcatttctct

SEQ ID NO: 40 - RNA, 21 nt, synthetic construct
  source 1..21: mol_type = other RNA
tcaggcgcatttctccgagct

SEQ ID NO: 41 - RNA, 21 nt, synthetic construct
  source 1..21: mol_type = other RNA
cgcatttctccgagcatccgt

SEQ ID NO: 42 - RNA, 21 nt, synthetic construct
  source 1..21: mol_type = other RNA
ttctccgagcatccgtctatt

SEQ ID NO: 43 - RNA, 21 nt, synthetic construct
  source 1..21: mol_type = other RNA
gagcatccgtctatgggcagt

SEQ ID NO: 44 - RNA, 21 nt, synthetic construct
  source 1..21: mol_type = other RNA
tccgtctatgggcagtttgtt

SEQ ID NO: 45 - RNA, 21 nt, synthetic construct
  source 1..21: mol_type = other RNA
tatgggcagtttgtggctggt

SEQ ID NO: 46 - RNA, 21 nt, synthetic construct
  source 1..21: mol_type = other RNA
cagtttgtggctggtgagact

SEQ ID NO: 47 - RNA, 21 nt, synthetic construct
  source 1..21: mol_type = other RNA
tggctggtgagacagcagagt

SEQ ID NO: 48 - RNA, 21 nt, synthetic construct
  source 1..21: mol_type = other RNA
gtgagacagcagaggaggtgt

SEQ ID NO: 49 - RNA, 21 nt, synthetic construct
  source 1..21: mol_type = other RNA
agcagaggaggtgaagggctt

SEQ ID NO: 50 - RNA, 21 nt, synthetic construct
  source 1..21: mol_type = other RNA
gaggtgaagggctgcgtgcat

SEQ ID NO: 51 - RNA, 21 nt, synthetic construct
  source 1..21: mol_type = other RNA
aagggctgcgtgcagcagctt

SEQ ID NO: 52 - RNA, 21 nt, synthetic construct
  source 1..21: mol_type = other RNA
tgctggcagtgcccactgagt

SEQ ID NO: 53 - RNA, 21 nt, synthetic construct
  source 1..21: mol_type = other RNA
gcagtgcccactgaggaggat

SEQ ID NO: 54 - RNA, 21 nt, synthetic construct
  source 1..21: mol_type = other RNA
ctgaggaggagccggactctt

SEQ ID NO: 55 - RNA, 21 nt, synthetic construct
  source 1..21: mol_type = other RNA
gagccggactctgctgccaat

SEQ ID NO: 56 - RNA, 21 nt, synthetic construct
  source 1..21: mol_type = other RNA
actctgctgccaagagtggtt

SEQ ID NO: 57 - RNA, 21 nt, synthetic construct
  source 1..21: mol_type = other RNA
gctgccaagagtggtgaggct

SEQ ID NO: 58 - RNA, 21 nt, synthetic construct
  source 1..21: mol_type = other RNA
agtggtgaggcgtggtatgat

SEQ ID NO: 59 - RNA, 21 nt, synthetic construct
  source 1..21: mol_type = other RNA
aacctcggtgctatgctgcgt

SEQ ID NO: 60 - RNA, 21 nt, synthetic construct
  source 1..21: mol_type = other RNA
cggtgctatgctgcggtgtgt

SEQ ID NO: 61 - RNA, 21 nt, synthetic construct
  source 1..21: mol_type = other RNA
ctatgctgcggtgtgtggact

SEQ ID NO: 62 - RNA, 21 nt, synthetic construct
  source 1..21: mol_type = other RNA
cggtgtgtggacctgtcacgt

SEQ ID NO: 63 - RNA, 21 nt, synthetic construct
  source 1..21: mol_type = other RNA
ggccagcctcatgcagctgat

SEQ ID NO: 64 - RNA, 21 nt, synthetic construct
  source 1..21: mol_type = other RNA
gcctcatgcagctgaaggtgt

SEQ ID NO: 65 - RNA, 21 nt, synthetic construct
  source 1..21: mol_type = other RNA
atgcagctgaaggtgacggct

SEQ ID NO: 66 - RNA, 21 nt, synthetic construct
  source 1..21: mol_type = other RNA
gctgaaggtgacggcgctgat

SEQ ID NO: 67 - RNA, 21 nt, synthetic construct
  source 1..21: mol_type = other RNA
ggtgacggcgctgaccagtat

SEQ ID NO: 68 - RNA, 21 nt, synthetic construct
  source 1..21: mol_type = other RNA
gctgaccagtactcggctctt

SEQ ID NO: 69 - RNA, 21 nt, synthetic construct
  source 1..21: mol_type = other RNA
agtactcggctctgtaaggat

SEQ ID NO: 70 - RNA, 21 nt, synthetic construct
  source 1..21: mol_type = other RNA
tcggctctgtaaggagctagt

SEQ ID NO: 71 - RNA, 21 nt, synthetic construct
  source 1..21: mol_type = other RNA
ctgtaaggagctagcctcgtt

SEQ ID NO: 72 - RNA, 21 nt, synthetic construct
  source 1..21: mol_type = other RNA
aggagctagcctcgtgggtct

SEQ ID NO: 73 - RNA, 21 nt, synthetic construct
  source 1..21: mol_type = other RNA
agcctcgtgggtcagaaggct

SEQ ID NO: 74 - RNA, 21 nt, synthetic construct
  source 1..21: mol_type = other RNA
gtgggtcagaaggccaggagt

SEQ ID NO: 75 - RNA, 21 nt, synthetic construct
  source 1..21: mol_type = other RNA
ggccaggagcctccttggagt

SEQ ID NO: 76 - RNA, 21 nt, synthetic construct
  source 1..21: mol_type = other RNA
ggagcctccttggagctgagt

SEQ ID NO: 77 - RNA, 21 nt, synthetic construct
  source 1..21: mol_type = other RNA
gagaggctggctgaagctatt

SEQ ID NO: 78 - RNA, 21 nt, synthetic construct
  source 1..21: mol_type = other RNA
ggctgaagctatggactctgt

SEQ ID NO: 79 - RNA, 21 nt, synthetic construct
  source 1..21: mol_type = other RNA
gctatggactctgggcagaat

SEQ ID NO: 80 - RNA, 21 nt, synthetic construct
  source 1..21: mol_type = other RNA
ctctgggcagaacctccaggt

SEQ ID NO: 81 - RNA, 21 nt, synthetic construct
  source 1..21: mol_type = other RNA
gaacctccaggtctcctgcct

SEQ ID NO: 82 - RNA, 21 nt, synthetic construct
  source 1..21: mol_type = other RNA
tccaggtctcctgcctcaatt

SEQ ID NO: 83 - RNA, 21 nt, synthetic construct
  source 1..21: mol_type = other RNA
tcctgcctcaatgctgagcat

SEQ ID NO: 84 - RNA, 21 nt, synthetic construct
  source 1..21: mol_type = other RNA
tcaatgctgagcagaaccagt

SEQ ID NO: 85 - RNA, 21 nt, synthetic construct
  source 1..21: mol_type = other RNA
gctgagcagaaccagcacctt

SEQ ID NO: 86 - RNA, 21 nt, synthetic construct
  source 1..21: mol_type = other RNA
gcatcgggtggcacagtatgt

SEQ ID NO: 87 - RNA, 21 nt, synthetic construct
  source 1..21: mol_type = other RNA
ctcctggtggatgcggagtat

SEQ ID NO: 88 - RNA, 21 nt, synthetic construct
  source 1..21: mol_type = other RNA
tggatgcggagtacacctcat

SEQ ID NO: 89 - RNA, 21 nt, synthetic construct
  source 1..21: mol_type = other RNA
gcggagtacacctcactgaat

SEQ ID NO: 90 - RNA, 21 nt, synthetic construct
  source 1..21: mol_type = other RNA
gtacacctcactgaaccctgt

SEQ ID NO: 91 - RNA, 21 nt, synthetic construct
  source 1..21: mol_type = other RNA
tcactgaaccctgcgctctct

SEQ ID NO: 92 - RNA, 21 nt, synthetic construct
  source 1..21: mol_type = other RNA
aaccctgcgctctcgctgctt

SEQ ID NO: 93 - RNA, 21 nt, synthetic construct
  source 1..21: mol_type = other RNA
ccctgggtgtggaacacctat

SEQ ID NO: 94 - RNA, 21 nt, synthetic construct
  source 1..21: mol_type = other RNA
ggtgtggaacacctaccaggt

SEQ ID NO: 95 - RNA, 21 nt, synthetic construct
  source 1..21: mol_type = other RNA
acctaccaggcctgtctaaat

SEQ ID NO: 96 - RNA, 21 nt, synthetic construct
  source 1..21: mol_type = other RNA
gcctgtctaaaggacacattt

SEQ ID NO: 97 - RNA, 21 nt, synthetic construct
  source 1..21: mol_type = other RNA
tctaaaggacacattcgagct

SEQ ID NO: 98 - RNA, 21 nt, synthetic construct
  source 1..21: mol_type = other RNA
ggacacattcgagcggctggt

SEQ ID NO: 99 - RNA, 21 nt, synthetic construct
  source 1..21: mol_type = other RNA
ggccttcggagtgaagctggt

SEQ ID NO: 100 - RNA, 21 nt, synthetic construct
  source 1..21: mol_type = other RNA
cggagtgaagctggtacgagt

SEQ ID NO: 101 - RNA, 21 nt, synthetic construct
  source 1..21: mol_type = other RNA
tgaagctggtacgaggtgcat

SEQ ID NO: 102 - RNA, 21 nt, synthetic construct
  source 1..21: mol_type = other RNA
ctggtacgaggtgcatatctt

SEQ ID NO: 103 - RNA, 21 nt, synthetic construct
  source 1..21: mol_type = other RNA
gaggtgcatatctggacaagt

SEQ ID NO: 104 - RNA, 21 nt, synthetic construct
  source 1..21: mol_type = other RNA
catatctggacaaggagagat

SEQ ID NO: 105 - RNA, 21 nt, synthetic construct
  source 1..21: mol_type = other RNA
ctggacaaggagagagcggtt

SEQ ID NO: 106 - RNA, 21 nt, synthetic construct
  source 1..21: mol_type = other RNA
gcccagctccatgggatggat

SEQ ID NO: 107 - RNA, 21 nt, synthetic construct
  source 1..21: mol_type = other RNA
gctccatgggatggaagacct

SEQ ID NO: 108 - RNA, 21 nt, synthetic construct
  source 1..21: mol_type = other RNA
ctcagcctgactatgaggcct

SEQ ID NO: 109 - RNA, 21 nt, synthetic construct
  source 1..21: mol_type = other RNA
gactatgaggccaccagtcat

SEQ ID NO: 110 - RNA, 21 nt, synthetic construct
  source 1..21: mol_type = other RNA
gaggccaccagtcagagttat

SEQ ID NO: 111 - RNA, 21 nt, synthetic construct
  source 1..21: mol_type = other RNA
accagtcagagttacagccgt

SEQ ID NO: 112 - RNA, 21 nt, synthetic construct
  source 1..21: mol_type = other RNA
tcagagttacagccgctgcct

SEQ ID NO: 113 - RNA, 21 nt, synthetic construct
  source 1..21: mol_type = other RNA
cagccgctgcctggaactgat

SEQ ID NO: 114 - RNA, 21 nt, synthetic construct
  source 1..21: mol_type = other RNA
gctgcctggaactgatgctgt

SEQ ID NO: 115 - RNA, 21 nt, synthetic construct
  source 1..21: mol_type = other RNA
ggaactgatgctgacgcacgt

SEQ ID NO: 116 - RNA, 21 nt, synthetic construct
  source 1..21: mol_type = other RNA
tgatgctgacgcacgtggcct

SEQ ID NO: 117 - RNA, 21 nt, synthetic construct
  source 1..21: mol_type = other RNA
catgtgccacctcatggtggt

SEQ ID NO: 118 - RNA, 21 nt, synthetic construct
  source 1..21: mol_type = other RNA
ctcatggtggcttcccacaat

SEQ ID NO: 119 - RNA, 21 nt, synthetic construct
  source 1..21: mol_type = other RNA
ggcttcccacaatgaggaatt

SEQ ID NO: 120 - RNA, 21 nt, synthetic construct
  source 1..21: mol_type = other RNA
cccacaatgaggaatctgttt

SEQ ID NO: 121 - RNA, 21 nt, synthetic construct
  source 1..21: mol_type = other RNA
aatgaggaatctgttcgccat

SEQ ID NO: 122 - RNA, 21 nt, synthetic construct
  source 1..21: mol_type = other RNA
tctgttcgccaggcaaccaat

SEQ ID NO: 123 - RNA, 21 nt, synthetic construct
  source 1..21: mol_type = other RNA
tcgccaggcaaccaagcgcat

SEQ ID NO: 124 - RNA, 21 nt, synthetic construct
  source 1..21: mol_type = other RNA
gcaaccaagcgcatgtgggat

SEQ ID NO: 125 - RNA, 21 nt, synthetic construct
  source 1..21: mol_type = other RNA
caagcgcatgtgggagctggt

SEQ ID NO: 126 - RNA, 21 nt, synthetic construct
  source 1..21: mol_type = other RNA
gcatgtgggagctgggcattt

SEQ ID NO: 127 - RNA, 21 nt, synthetic construct
  source 1..21: mol_type = other RNA
tgggagctgggcattcctctt

SEQ ID NO: 128 - RNA, 21 nt, synthetic construct
  source 1..21: mol_type = other RNA
gggcattcctctggatgggat

SEQ ID NO: 129 - RNA, 21 nt, synthetic construct
  source 1..21: mol_type = other RNA
ttcctctggatgggactgtct

SEQ ID NO: 130 - RNA, 21 nt, synthetic construct
  source 1..21: mol_type = other RNA
ctggatgggactgtctgtttt

SEQ ID NO: 131 - RNA, 21 nt, synthetic construct
  source 1..21: mol_type = other RNA
tgggactgtctgtttcggact

SEQ ID NO: 132 - RNA, 21 nt, synthetic construct
  source 1..21: mol_type = other RNA
ctgtctgtttcggacaacttt

SEQ ID NO: 133 - RNA, 21 nt, synthetic construct
  source 1..21: mol_type = other RNA
ttcggacaacttctgggcatt

SEQ ID NO: 134 - RNA, 21 nt, synthetic construct
  source 1..21: mol_type = other RNA
cttctgggcatgtgtgaccat

SEQ ID NO: 135 - RNA, 21 nt, synthetic construct
  source 1..21: mol_type = other RNA
atgtgtgaccacgtctctctt

SEQ ID NO: 136 - RNA, 21 nt, synthetic construct
  source 1..21: mol_type = other RNA
gaccacgtctctctagcactt

SEQ ID NO: 137 - RNA, 21 nt, synthetic construct
  source 1..21: mol_type = other RNA
gcaggccggctatgtagtgtt

SEQ ID NO: 138 - RNA, 21 nt, synthetic construct
  source 1..21: mol_type = other RNA
ccggctatgtagtgtataagt

SEQ ID NO: 139 - RNA, 21 nt, synthetic construct
  source 1..21: mol_type = other RNA
atgtagtgtataagtccattt

SEQ ID NO: 140 - RNA, 21 nt, synthetic construct
  source 1..21: mol_type = other RNA
gtgtataagtccattccctat

SEQ ID NO: 141 - RNA, 21 nt, synthetic construct
  source 1..21: mol_type = other RNA
aagtccattccctatggctct

SEQ ID NO: 142 - RNA, 21 nt, synthetic construct
  source 1..21: mol_type = other RNA
ttccctatggctccttggagt

SEQ ID NO: 143 - RNA, 21 nt, synthetic construct
  source 1..21: mol_type = other RNA
ggctccttggaggaggtaatt

SEQ ID NO: 144 - RNA, 21 nt, synthetic construct
  source 1..21: mol_type = other RNA
atccggagggcccaggagaat

SEQ ID NO: 145 - RNA, 21 nt, synthetic construct
  source 1..21: mol_type = other RNA
gaaccggagcgtgcttcaggt

SEQ ID NO: 146 - RNA, 21 nt, synthetic construct
  source 1..21: mol_type = other RNA
cagggtgcccgcagggaacat

SEQ ID NO: 147 - RNA, 21 nt, synthetic construct
  source 1..21: mol_type = other RNA
cagggaacaggagctgctcat

SEQ ID NO: 148 - RNA, 21 nt, synthetic construct
  source 1..21: mol_type = other RNA
aacaggagctgctcagccaat

SEQ ID NO: 149 - RNA, 21 nt, synthetic construct
  source 1..21: mol_type = other RNA
gagctgctcagccaagaactt

SEQ ID NO: 150 - RNA, 21 nt, synthetic construct
  source 1..21: mol_type = other RNA
gctcagccaagaactgtggct

SEQ ID NO: 151 - RNA, 21 nt, synthetic construct
  source 1..21: mol_type = other RNA
tgccaggatgccgaaggatat

SEQ ID NO: 152 - RNA, 21 nt, synthetic construct
  source 1..21: mol_type = other RNA
tcatgtggtcaataaaagtct

SEQ ID NO: 153 - RNA, 21 nt, synthetic construct
  source 1..21: mol_type = other RNA
tcaataaaagtccttaggtgt

SEQ ID NO: 154 - RNA, 21 nt, synthetic construct
  source 1..21: mol_type = other RNA
aaaagtccttaggtgctgcct

SEQ ID NO: 155 - RNA, 23 nt, synthetic construct
  source 1..23: mol_type = other RNA
atccacaccagggaaggttctct

SEQ ID NO: 156 - RNA, 23 nt, synthetic construct
  source 1..23: mol_type = other RNA
actgcctccacaccagggaaggt

SEQ ID NO: 157 - RNA, 23 nt, synthetic construct
  source 1..23: mol_type = other RNA
aaacaggtccggagcatcctggg

SEQ ID NO: 158 - RNA, 23 nt, synthetic construct
  source 1..23: mol_type = other RNA
acacgtaacaggtccggagcatc

SEQ ID NO: 159 - RNA, 23 nt, synthetic construct
  source 1..23: mol_type = other RNA
aaacagagcacgtaacaggtccg

SEQ ID NO: 160 - RNA, 23 nt, synthetic construct
  source 1..23: mol_type = other RNA
agcttgggaacagagcacgtaac

SEQ ID NO: 161 - RNA, 23 nt, synthetic construct
  source 1..23: mol_type = other RNA
agaccagcttgggaacagagcac

SEQ ID NO: 162 - RNA, 23 nt, synthetic construct
  source 1..23: mol_type = other RNA
acaaagctcagggactgccagcc

SEQ ID NO: 163 - RNA, 23 nt, synthetic construct
  source 1..23: mol_type = other RNA
acgccatcaaagctcagggactg

SEQ ID NO: 164 - RNA, 23 nt, synthetic construct
  source 1..23: mol_type = other RNA
agtgcccttaaggtggaaggccc

SEQ ID NO: 165 - RNA, 23 nt, synthetic construct
  source 1..23: mol_type = other RNA
atctcctgtgcccttaaggtgga

SEQ ID NO: 166 - RNA, 23 nt, synthetic construct
  source 1..23: mol_type = other RNA
agtgtcagctctcctgtgccctt

SEQ ID NO: 167 - RNA, 23 nt, synthetic construct
  source 1..23: mol_type = other RNA
aaaggcccgtgtcagctctcctg

SEQ ID NO: 168 - RNA, 23 nt, synthetic construct
  source 1..23: mol_type = other RNA
agaaccagcaaggcccgtgtcag

SEQ ID NO: 169 - RNA, 23 nt, synthetic construct
  source 1..23: mol_type = other RNA
aacagccggagaaccagcaaggc

SEQ ID NO: 170 - RNA, 23 nt, synthetic construct
  source 1..23: mol_type = other RNA
aaggcacacagccggagaaccag

SEQ ID NO: 171 - RNA, 23 nt, synthetic construct
  source 1..23: mol_type = other RNA
aaacagcccgtgagtgacgagtg

SEQ ID NO: 172 - RNA, 23 nt, synthetic construct
  source 1..23: mol_type = other RNA
actggagcaacagcccgtgagtg

SEQ ID NO: 173 - RNA, 23 nt, synthetic construct
  source 1..23: mol_type = other RNA
acgagaccaggcctggagcaaca

SEQ ID NO: 174 - RNA, 23 nt, synthetic construct
  source 1..23: mol_type = other RNA
agagaaatgcgcctgagagccgg

SEQ ID NO: 175 - RNA, 23 nt, synthetic construct
  source 1..23: mol_type = other RNA
agctcggagaaatgcgcctgaga

SEQ ID NO: 176 - RNA, 23 nt, synthetic construct
  source 1..23: mol_type = other RNA
acggatgctcggagaaatgcgcc

SEQ ID NO: 177 - RNA, 23 nt, synthetic construct
  source 1..23: mol_type = other RNA
aatagacggatgctcggagaaat

SEQ ID NO: 178 - RNA, 23 nt, synthetic construct
  source 1..23: mol_type = other RNA
actgcccatagacggatgctcgg

SEQ ID NO: 179 - RNA, 23 nt, synthetic construct
  source 1..23: mol_type = other RNA
aacaaactgcccatagacggatg

SEQ ID NO: 180 - RNA, 23 nt, synthetic construct
  source 1..23: mol_type = other RNA
accagccacaaactgcccataga

SEQ ID NO: 181 - RNA, 23 nt, synthetic construct
  source 1..23: mol_type = other RNA
agtctcaccagccacaaactgcc

SEQ ID NO: 182 - RNA, 23 nt, synthetic construct
  source 1..23: mol_type = other RNA
actctgctgtctcaccagccaca

SEQ ID NO: 183 - RNA, 23 nt, synthetic construct
  source 1..23: mol_type = other RNA
acacctcctctgctgtctcacca

SEQ ID NO: 184 - RNA, 23 nt, synthetic construct
  source 1..23: mol_type = other RNA
aagcccttcacctcctctgctgt

SEQ ID NO: 185 - RNA, 23 nt, synthetic construct
  source 1..23: mol_type = other RNA
atgcacgcagcccttcacctcct

SEQ ID NO: 186 - RNA, 23 nt, synthetic construct
  source 1..23: mol_type = other RNA
aagctgctgcacgcagcccttca

SEQ ID NO: 187 - RNA, 23 nt, synthetic construct
  source 1..23: mol_type = other RNA
actcagtgggcactgccagcagt

SEQ ID NO: 188 - RNA, 23 nt, synthetic construct
  source 1..23: mol_type = other RNA
atcctcctcagtgggcactgcca

SEQ ID NO: 189 - RNA, 23 nt, synthetic construct
  source 1..23: mol_type = other RNA
aagagtccggctcctcctcagtg

SEQ ID NO: 190 - RNA, 23 nt, synthetic construct
  source 1..23: mol_type = other RNA
attggcagcagagtccggctcct

SEQ ID NO: 191 - RNA, 23 nt, synthetic construct
  source 1..23: mol_type = other RNA
aaccactcttggcagcagagtcc

SEQ ID NO: 192 - RNA, 23 nt, synthetic construct
  source 1..23: mol_type = other RNA
agcctcaccactcttggcagcag

SEQ ID NO: 193 - RNA, 23 nt, synthetic construct
  source 1..23: mol_type = other RNA
atcataccacgcctcaccactct

SEQ ID NO: 194 - RNA, 23 nt, synthetic construct
  source 1..23: mol_type = other RNA
acgcagcatagcaccgaggttcc

SEQ ID NO: 195 - RNA, 23 nt, synthetic construct
  source 1..23: mol_type = other RNA
acacaccgcagcatagcaccgag

SEQ ID NO: 196 - RNA, 23 nt, synthetic construct
  source 1..23: mol_type = other RNA
agtccacacaccgcagcatagca

SEQ ID NO: 197 - RNA, 23 nt, synthetic construct
  source 1..23: mol_type = other RNA
acgtgacaggtccacacaccgca

SEQ ID NO: 198 - RNA, 23 nt, synthetic construct
  source 1..23: mol_type = other RNA
atcagctgcatgaggctggcctc

SEQ ID NO: 199 - RNA, 23 nt, synthetic construct
  source 1..23: mol_type = other RNA
acaccttcagctgcatgaggctg

SEQ ID NO: 200 - RNA, 23 nt, synthetic construct
  source 1..23: mol_type = other RNA
agccgtcaccttcagctgcatga

SEQ ID NO: 201 - RNA, 23 nt, synthetic construct
  source 1..23: mol_type = other RNA
atcagcgccgtcaccttcagctg

SEQ ID NO: 202 - RNA, 23 nt, synthetic construct
  source 1..23: mol_type = other RNA
atactggtcagcgccgtcacctt

SEQ ID NO: 203 - RNA, 23 nt, synthetic construct
  source 1..23: mol_type = other RNA
aagagccgagtactggtcagcgc

SEQ ID NO: 204 - RNA, 23 nt, synthetic construct
  source 1..23: mol_type = other RNA
atccttacagagccgagtactgg

SEQ ID NO: 205 - RNA, 23 nt, synthetic construct
  source 1..23: mol_type = other RNA
actagctccttacagagccgagt

SEQ ID NO: 206 - RNA, 23 nt, synthetic construct
  source 1..23: mol_type = other RNA
aacgaggctagctccttacagag

SEQ ID NO: 207 - RNA, 23 nt, synthetic construct
  source 1..23: mol_type = other RNA
agacccacgaggctagctcctta

SEQ ID NO: 208 - RNA, 23 nt, synthetic construct
  source 1..23: mol_type = other RNA
agccttctgacccacgaggctag

SEQ ID NO: 209 - RNA, 23 nt, synthetic construct
  source 1..23: mol_type = other RNA
actcctggccttctgacccacga

SEQ ID NO: 210 - RNA, 23 nt, synthetic construct
  source 1..23: mol_type = other RNA
actccaaggaggctcctggcctt

SEQ ID NO: 211 - RNA, 23 nt, synthetic construct
  source 1..23: mol_type = other RNA
actcagctccaaggaggctcctg

SEQ ID NO: 212 - RNA, 23 nt, synthetic construct
  source 1..23: mol_type = other RNA
aatagcttcagccagcctctcgg

SEQ ID NO: 213 - RNA, 23 nt, synthetic construct
  source 1..23: mol_type = other RNA
acagagtccatagcttcagccag

SEQ ID NO: 214 - RNA, 23 nt, synthetic construct
  source 1..23: mol_type = other RNA
attctgcccagagtccatagctt

SEQ ID NO: 215 - RNA, 23 nt, synthetic construct
  source 1..23: mol_type = other RNA
acctggaggttctgcccagagtc

SEQ ID NO: 216 - RNA, 23 nt, synthetic construct
  source 1..23: mol_type = other RNA
aggcaggagacctggaggttctg

SEQ ID NO: 217 - RNA, 23 nt, synthetic construct
  source 1..23: mol_type = other RNA
aattgaggcaggagacctggagg

SEQ ID NO: 218 - RNA, 23 nt, synthetic construct
  source 1..23: mol_type = other RNA
atgctcagcattgaggcaggaga

SEQ ID NO: 219 - RNA, 23 nt, synthetic construct
  source 1..23: mol_type = other RNA
actggttctgctcagcattgagg

SEQ ID NO: 220 - RNA, 23 nt, synthetic construct
  source 1..23: mol_type = other RNA
aaggtgctggttctgctcagcat

SEQ ID NO: 221 - RNA, 23 nt, synthetic construct
  source 1..23: mol_type = other RNA
acatactgtgccacccgatgcag

SEQ ID NO: 222 - RNA, 23 nt, synthetic construct
  source 1..23: mol_type = other RNA
atactccgcatccaccaggagcc

SEQ ID NO: 223 - RNA, 23 nt, synthetic construct
  source 1..23: mol_type = other RNA
atgaggtgtactccgcatccacc

SEQ ID NO: 224 - RNA, 23 nt, synthetic construct
  source 1..23: mol_type = other RNA
attcagtgaggtgtactccgcat

SEQ ID NO: 225 - RNA, 23 nt, synthetic construct
  source 1..23: mol_type = other RNA
acagggttcagtgaggtgtactc

SEQ ID NO: 226 - RNA, 23 nt, synthetic construct
  source 1..23: mol_type = other RNA
agagagcgcagggttcagtgagg

SEQ ID NO: 227 - RNA, 23 nt, synthetic construct
  source 1..23: mol_type = other RNA
aagcagcgagagcgcagggttca

SEQ ID NO: 228 - RNA, 23 nt, synthetic construct
  source 1..23: mol_type = other RNA
ataggtgttccacacccagggcc

SEQ ID NO: 229 - RNA, 23 nt, synthetic construct
  source 1..23: mol_type = other RNA
acctggtaggtgttccacaccca

SEQ ID NO: 230 - RNA, 23 nt, synthetic construct
  source 1..23: mol_type = other RNA
atttagacaggcctggtaggtgt

SEQ ID NO: 231 - RNA, 23 nt, synthetic construct
  source 1..23: mol_type = other RNA
aaatgtgtcctttagacaggcct

SEQ ID NO: 232 - RNA, 23 nt, synthetic construct
  source 1..23: mol_type = other RNA
agctcgaatgtgtcctttagaca

SEQ ID NO: 233 - RNA, 23 nt, synthetic construct
  source 1..23: mol_type = other RNA
accagccgctcgaatgtgtcctt

SEQ ID NO: 234 - RNA, 23 nt, synthetic construct
  source 1..23: mol_type = other RNA
accagcttcactccgaaggccag

SEQ ID NO: 235 - RNA, 23 nt, synthetic construct
  source 1..23: mol_type = other RNA
actcgtaccagcttcactccgaa

SEQ ID NO: 236 - RNA, 23 nt, synthetic construct
  source 1..23: mol_type = other RNA
atgcacctcgtaccagcttcact

SEQ ID NO: 237 - RNA, 23 nt, synthetic construct
  source 1..23: mol_type = other RNA
aagatatgcacctcgtaccagct

SEQ ID NO: 238 - RNA, 23 nt, synthetic construct
  source 1..23: mol_type = other RNA
acttgtccagatatgcacctcgt

SEQ ID NO: 239 - RNA, 23 nt, synthetic construct
  source 1..23: mol_type = other RNA
atctctccttgtccagatatgca

SEQ ID NO: 240 - RNA, 23 nt, synthetic construct
  source 1..23: mol_type = other RNA
aaccgctctctccttgtccagat

SEQ ID NO: 241 - RNA, 23 nt, synthetic construct
  source 1..23: mol_type = other RNA
atccatcccatggagctgggcca

SEQ ID NO: 242 - RNA, 23 nt, synthetic construct
  source 1..23: mol_type = other RNA
aggtcttccatcccatggagctg

SEQ ID NO: 243 - RNA, 23 nt, synthetic construct
  source 1..23: mol_type = other RNA
aggcctcatagtcaggctgagtg

SEQ ID NO: 244 - RNA, 23 nt, synthetic construct
  source 1..23: mol_type = other RNA
atgactggtggcctcatagtcag

SEQ ID NO: 245 - RNA, 23 nt, synthetic construct
  source 1..23: mol_type = other RNA
ataactctgactggtggcctcat

SEQ ID NO: 246 - RNA, 23 nt, synthetic construct
  source 1..23: mol_type = other RNA
acggctgtaactctgactggtgg

SEQ ID NO: 247 - RNA, 23 nt, synthetic construct
  source 1..23: mol_type = other RNA
aggcagcggctgtaactctgact

SEQ ID NO: 248 - RNA, 23 nt, synthetic construct
  source 1..23: mol_type = other RNA
atcagttccaggcagcggctgta

SEQ ID NO: 249 - RNA, 23 nt, synthetic construct
  source 1..23: mol_type = other RNA
acagcatcagttccaggcagcgg

SEQ ID NO: 250 - RNA, 23 nt, synthetic construct
  source 1..23: mol_type = other RNA
acgtgcgtcagcatcagttccag

SEQ ID NO: 251 - RNA, 23 nt, synthetic construct
  source 1..23: mol_type = other RNA
aggccacgtgcgtcagcatcagt

SEQ ID NO: 252 - RNA, 23 nt, synthetic construct
  source 1..23: mol_type = other RNA
accaccatgaggtggcacatggg

SEQ ID NO: 253 - RNA, 23 nt, synthetic construct
  source 1..23: mol_type = other RNA
attgtgggaagccaccatgaggt

SEQ ID NO: 254 - RNA, 23 nt, synthetic construct
  source 1..23: mol_type = other RNA
aattcctcattgtgggaagccac

SEQ ID NO: 255 - RNA, 23 nt, synthetic construct
  source 1..23: mol_type = other RNA
aaacagattcctcattgtgggaa

SEQ ID NO: 256 - RNA, 23 nt, synthetic construct
  source 1..23: mol_type = other RNA
atggcgaacagattcctcattgt

SEQ ID NO: 257 - RNA, 23 nt, synthetic construct
  source 1..23: mol_type = other RNA
attggttgcctggcgaacagatt

SEQ ID NO: 258 - RNA, 23 nt, synthetic construct
  source 1..23: mol_type = other RNA
atgcgcttggttgcctggcgaac

SEQ ID NO: 259 - RNA, 23 nt, synthetic construct
  source 1..23: mol_type = other RNA
atcccacatgcgcttggttgcct

SEQ ID NO: 260 - RNA, 23 nt, synthetic construct
  source 1..23: mol_type = other RNA
accagctcccacatgcgcttggt

SEQ ID NO: 261 - RNA, 23 nt, synthetic construct
  source 1..23: mol_type = other RNA
aaatgcccagctcccacatgcgc

SEQ ID NO: 262 - RNA, 23 nt, synthetic construct
  source 1..23: mol_type = other RNA
aagaggaatgcccagctcccaca

SEQ ID NO: 263 - RNA, 23 nt, synthetic construct
  source 1..23: mol_type = other RNA
atcccatccagaggaatgcccag

SEQ ID NO: 264 - RNA, 23 nt, synthetic construct
  source 1..23: mol_type = other RNA
agacagtcccatccagaggaatg

SEQ ID NO: 265 - RNA, 23 nt, synthetic construct
  source 1..23: mol_type = other RNA
aaaacagacagtcccatccagag

SEQ ID NO: 266 - RNA, 23 nt, synthetic construct
  source 1..23: mol_type = other RNA
agtccgaaacagacagtcccatc

SEQ ID NO: 267 - RNA, 23 nt, synthetic construct
  source 1..23: mol_type = other RNA
aaagttgtccgaaacagacagtc

SEQ ID NO: 268 - RNA, 23 nt, synthetic construct
  source 1..23: mol_type = other RNA
aatgcccagaagttgtccgaaac

SEQ ID NO: 269 - RNA, 23 nt, synthetic construct
  source 1..23: mol_type = other RNA
atggtcacacatgcccagaagtt

SEQ ID NO: 270 - RNA, 23 nt, synthetic construct
  source 1..23: mol_type = other RNA
aagagagacgtggtcacacatgc

SEQ ID NO: 271 - RNA, 23 nt, synthetic construct
  source 1..23: mol_type = other RNA
aagtgctagagagacgtggtcac

SEQ ID NO: 272 - RNA, 23 nt, synthetic construct
  source 1..23: mol_type = other RNA
aacactacatagccggcctgccc

SEQ ID NO: 273 - RNA, 23 nt, synthetic construct
  source 1..23: mol_type = other RNA
acttatacactacatagccggcc

SEQ ID NO: 274 - RNA, 23 nt, synthetic construct
  source 1..23: mol_type = other RNA
aaatggacttatacactacatag

SEQ ID NO: 275 - RNA, 23 nt, synthetic construct
  source 1..23: mol_type = other RNA
atagggaatggacttatacacta

SEQ ID NO: 276 - RNA, 23 nt, synthetic construct
  source 1..23: mol_type = other RNA
agagccatagggaatggacttat

SEQ ID NO: 277 - RNA, 23 nt, synthetic construct
  source 1..23: mol_type = other RNA
actccaaggagccatagggaatg

SEQ ID NO: 278 - RNA, 23 nt, synthetic construct
  source 1..23: mol_type = other RNA
aattacctcctccaaggagccat

SEQ ID NO: 279 - RNA, 23 nt, synthetic construct
  source 1..23: mol_type = other RNA
attctcctgggccctccggatca

SEQ ID NO: 280 - RNA, 23 nt, synthetic construct
  source 1..23: mol_type = other RNA
acctgaagcacgctccggttctc

SEQ ID NO: 281 - RNA, 23 nt, synthetic construct
  source 1..23: mol_type = other RNA
atgttccctgcgggcaccctgaa

SEQ ID NO: 282 - RNA, 23 nt, synthetic construct
  source 1..23: mol_type = other RNA
atgagcagctcctgttccctgcg

SEQ ID NO: 283 - RNA, 23 nt, synthetic construct
  source 1..23: mol_type = other RNA
attggctgagcagctcctgttcc

SEQ ID NO: 284 - RNA, 23 nt, synthetic construct
  source 1..23: mol_type = other RNA
aagttcttggctgagcagctcct

SEQ ID NO: 285 - RNA, 23 nt, synthetic construct
  source 1..23: mol_type = other RNA
agccacagttcttggctgagcag

SEQ ID NO: 286 - RNA, 23 nt, synthetic construct
  source 1..23: mol_type = other RNA
atatccttcggcatcctggcagc

SEQ ID NO: 287 - RNA, 23 nt, synthetic construct
  source 1..23: mol_type = other RNA
agacttttattgaccacatgacc

SEQ ID NO: 288 - RNA, 23 nt, synthetic construct
  source 1..23: mol_type = other RNA
acacctaaggacttttattgacc

SEQ ID NO: 289 - RNA, 23 nt, synthetic construct
  source 1..23: mol_type = other RNA
aggcagcacctaaggacttttat

SEQ ID NO: 290 - RNA, 21 nt, synthetic construct
  source 1..21: mol_type = other RNA
  modified_base 1: mod_base = OTHER; note = 2'-O-methyladenosine-3'-phosphorothioate
  modified_base 2: mod_base = OTHER; note = 2'-O-methylguanosine-3'-phosphorothioate
  modified_base 3: mod_base = OTHER; note = 2'-O-methyladenosine-3'-phosphate
  modified_base 4: mod_base = OTHER; note = 2'-O-methyladenosine-3'-phosphate
  modified_base 5: mod_base = OTHER; note = 2'-O-methylcytidine-3'-phosphate
  modified_base 6: mod_base = OTHER; note = 2'-O-methylcytidine-3'-phosphate
  modified_base 7: mod_base = OTHER; note = 2'-deoxy-2'-fluorouridine-3'-phosphate
  modified_base 8: mod_base = OTHER; note = 2'-O-methyluridine-3'-phosphate
  modified_base 9: mod_base = OTHER; note = 2'-deoxy-2'-fluorocytidine-3'-phosphate
  modified_base 10: mod_base = OTHER; note = 2'-deoxy-2'-fluorocytidine-3'-phosphate
  modified_base 11: mod_base = OTHER; note = 2'-deoxy-2'-fluorocytidine-3'-phosphate
  modified_base 12: mod_base = OTHER; note = 2'-O-methyluridine-3'-phosphate
  modified_base 13: mod_base = OTHER; note = 2'-O-methylguanosine-3'-phosphate
  modified_base 14: mod_base = OTHER; note = 2'-O-methylguanosine-3'-phosphate
  modified_base 15: mod_base = OTHER; note = 2'-O-methyluridine-3'-phosphate
  modified_base 16: mod_base = OTHER; note = 2'-O-methylguanosine-3'-phosphate
  modified_base 17: mod_base = OTHER; note = 2'-O-methyluridine-3'-phosphate
  modified_base 18: mod_base = OTHER; note = 2'-O-methylguanosine-3'-phosphate
  modified_base 19: mod_base = OTHER; note = 2'-O-methylguanosine-3'-phosphate
  modified_base 20: mod_base = OTHER; note = 2'-O-methyladenosine-3'-phosphate
  modified_base 21: mod_base = OTHER; note = 2'-O-methyluridine-3'-phosphate ((2S,4R)-1-[29-[[2-(acetylamino)-2-deoxy-beta-D-galactopyra nosyl]oxy]-14,14-bis[[3-[[3-[[5-[[2-(acetylamino)-2-deoxy-b eta-D-galactopyranosyl]oxy]-1-oxopentyl]amino]propyl]amino] -3-oxopropoxy]methyl]-1,12,19,25-tetraoxo-16-oxa-13,20,24-t riazanonacos-1-yl]-4-hydroxy-2-pyrrolidinyl)methyl ester
agaaccttccctggtgtggat

SEQ ID NO: 291 - RNA, 21 nt, synthetic construct
  source 1..21: mol_type = other RNA
  modified_base 1: mod_base = OTHER; note = 2'-O-methylcytidine-3'-phosphorothioate
  modified_base 2: mod_base = OTHER; note = 2'-O-methyluridine-3'-phosphorothioate
  modified_base 3: mod_base = OTHER; note = 2'-O-methyluridine-3'-phosphate
  modified_base 4: mod_base = OTHER; note = 2'-O-methylcytidine-3'-phosphate
  modified_base 5: mod_base = OTHER; note = 2'-O-methylcytidine-3'-phosphate
  modified_base 6: mod_base = OTHER; note = 2'-O-methylcytidine-3'-phosphate
  modified_base 7: mod_base = OTHER; note = 2'-deoxy-2'-fluorouridine-3'-phosphate
  modified_base 8: mod_base = OTHER; note = 2'-O-methylguanosine-3'-phosphate
  modified_base 9: mod_base = OTHER; note = 2'-deoxy-2'-fluoroguanosine-3'-phosphate
  modified_base 10: mod_base = OTHER; note = 2'-deoxy-2'-fluorouridine-3'-phosphate
  modified_base 11: mod_base = OTHER; note = 2'-deoxy-2'-fluoroguanosine-3'-phosphate
  modified_base 12: mod_base = OTHER; note = 2'-O-methyluridine-3'-phosphate
  modified_base 13: mod_base = OTHER; note = 2'-O-methylguanosine-3'-phosphate
  modified_base 14: mod_base = OTHER; note = 2'-O-methylguanosine-3'-phosphate
  modified_base 15: mod_base = OTHER; note = 2'-O-methyladenosine-3'-phosphate
  modified_base 16: mod_base = OTHER; note = 2'-O-methylguanosine-3'-phosphate
  modified_base 17: mod_base = OTHER; note = 2'-O-methylguanosine-3'-phosphate
  modified_base 18: mod_base = OTHER; note = 2'-O-methylcytidine-3'-phosphate
  modified_base 19: mod_base = OTHER; note = 2'-O-methyladenosine-3'-phosphate
  modified_base 20: mod_base = OTHER; note = 2'-O-methylguanosine-3'-phosphate
  modified_base 21: mod_base = OTHER; note = 2'-O-methyluridine-3'-phosphate ((2S,4R)-1-[29-[[2-(acetylamino)-2-deoxy-beta-D-galactopyra nosyl]oxy]-14,14-bis[[3-[[3-[[5-[[2-(acetylamino)-2-deoxy-b eta-D-galactopyranosyl]oxy]-1-oxopentyl]amino]propyl]amino] -3-oxopropoxy]methyl]-1,12,19,25-tetraoxo-16-oxa-13,20,24-t riazanonacos-1-yl]-4-hydroxy-2-pyrrolidinyl)methyl ester
cttccctggtgtggaggcagt

SEQ ID NO: 292 - RNA, 21 nt, synthetic construct
  source 1..21: mol_type = other RNA
  modified_base 1: mod_base = OTHER; note = 2'-O-methylcytidine-3'-phosphorothioate
  modified_base 2: mod_base = OTHER; note = 2'-O-methyladenosine-3'-phosphorothioate
  modified_base 3: mod_base = OTHER; note = 2'-O-methylguanosine-3'-phosphate
  modified_base 4: mod_base = OTHER; note = 2'-O-methylguanosine-3'-phosphate
  modified_base 5: mod_base = OTHER; note = 2'-O-methyladenosine-3'-phosphate
  modified_base 6: mod_base = OTHER; note = 2'-O-methyluridine-3'-phosphate
  modified_base 7: mod_base = OTHER; note = 2'-deoxy-2'-fluoroguanosine-3'-phosphate
  modified_base 8: mod_base = OTHER; note = 2'-O-methylcytidine-3'-phosphate
  modified_base 9: mod_base = OTHER; note = 2'-deoxy-2'-fluorouridine-3'-phosphate
  modified_base 10: mod_base = OTHER; note = 2'-deoxy-2'-fluorocytidine-3'-phosphate
  modified_base 11: mod_base = OTHER; note = 2'-deoxy-2'-fluorocytidine-3'-phosphate
  modified_base 12: mod_base = OTHER; note = 2'-O-methylguanosine-3'-phosphate
  modified_base 13: mod_base = OTHER; note = 2'-O-methylguanosine-3'-phosphate
  modified_base 14: mod_base = OTHER; note = 2'-O-methyladenosine-3'-phosphate
  modified_base 15: mod_base = OTHER; note = 2'-O-methylcytidine-3'-phosphate
  modified_base 16: mod_base = OTHER; note = 2'-O-methylcytidine-3'-phosphate
  modified_base 17: mod_base = OTHER; note = 2'-O-methyluridine-3'-phosphate
  modified_base 18: mod_base = OTHER; note = 2'-O-methylguanosine-3'-phosphate
  modified_base 19: mod_base = OTHER; note = 2'-O-methyluridine-3'-phosphate
  modified_base 20: mod_base = OTHER; note = 2'-O-methyluridine-3'-phosphate
  modified_base 21: mod_base = OTHER; note = 2'-O-methyluridine-3'-phosphate ((2S,4R)-1-[29-[[2-(acetylamino)-2-deoxy-beta-D-galactopyra nosyl]oxy]-14,14-bis[[3-[[3-[[5-[[2-(acetylamino)-2-deoxy-b eta-D-galactopyranosyl]oxy]-1-oxopentyl]amino]propyl]amino] -3-oxopropoxy]methyl]-1,12,19,25-tetraoxo-16-oxa-13,20,24-t riazanonacos-1-yl]-4-hydroxy-2-pyrrolidinyl)methyl ester
caggatgctccggacctgttt

SEQ ID NO: 293 - RNA, 21 nt, synthetic construct
  source 1..21: mol_type = other RNA
  modified_base 1: mod_base = OTHER; note = 2'-O-methyluridine-3'-phosphorothioate
  modified_base 2: mod_base = OTHER; note = 2'-O-methylguanosine-3'-phosphorothioate
  modified_base 3: mod_base = OTHER; note = 2'-O-methylcytidine-3'-phosphate
  modified_base 4: mod_base = OTHER; note = 2'-O-methyluridine-3'-phosphate
  modified_base 5: mod_base = OTHER; note = 2'-O-methylcytidine-3'-phosphate
  modified_base 6: mod_base = OTHER; note = 2'-O-methylcytidine-3'-phosphate
  modified_base 7: mod_base = OTHER; note = 2'-deoxy-2'-fluoroguanosine-3'-phosphate
  modified_base 8: mod_base = OTHER; note = 2'-O-methylguanosine-3'-phosphate
  modified_base 9: mod_base = OTHER; note = 2'-deoxy-2'-fluoroadenosine-3'-phosphate
  modified_base 10: mod_base = OTHER; note = 2'-deoxy-2'-fluorocytidine-3'-phosphate
  modified_base 11: mod_base = OTHER; note = 2'-deoxy-2'-fluorocytidine-3'-phosphate
  modified_base 12: mod_base = OTHER; note = 2'-O-methyluridine-3'-phosphate
  modified_base 13: mod_base = OTHER; note = 2'-O-methylguanosine-3'-phosphate
  modified_base 14: mod_base = OTHER; note = 2'-O-methyluridine-3'-phosphate
  modified_base 15: mod_base = OTHER; note = 2'-O-methyluridine-3'-phosphate
  modified_base 16: mod_base = OTHER; note = 2'-O-methyladenosine-3'-phosphate
  modified_base 17: mod_base = OTHER; note = 2'-O-methylcytidine-3'-phosphate
  modified_base 18: mod_base = OTHER; note = 2'-O-methylguanosine-3'-phosphate
  modified_base 19: mod_base = OTHER; note = 2'-O-methyluridine-3'-phosphate
  modified_base 20: mod_base = OTHER; note = 2'-O-methylguanosine-3'-phosphate
  modified_base 21: mod_base = OTHER; note = 2'-O-methyluridine-3'-phosphate ((2S,4R)-1-[29-[[2-(acetylamino)-2-deoxy-beta-D-galactopyra nosyl]oxy]-14,14-bis[[3-[[3-[[5-[[2-(acetylamino)-2-deoxy-b eta-D-galactopyranosyl]oxy]-1-oxopentyl]amino]propyl]amino] -3-oxopropoxy]methyl]-1,12,19,25-tetraoxo-16-oxa-13,20,24-t riazanonacos-1-yl]-4-hydroxy-2-pyrrolidinyl)methyl ester
tgctccggacctgttacgtgt

SEQ ID NO: 294 - RNA, 21 nt, synthetic construct
  source 1..21: mol_type = other RNA
  modified_base 1: mod_base = OTHER; note = 2'-O-methylguanosine-3'-phosphorothioate
  modified_base 2: mod_base = OTHER; note = 2'-O-methyladenosine-3'-phosphorothioate
  modified_base 3: mod_base = OTHER; note = 2'-O-methylcytidine-3'-phosphate
  modified_base 4: mod_base = OTHER; note = 2'-O-methylcytidine-3'-phosphate
  modified_base 5: mod_base = OTHER; note = 2'-O-methyluridine-3'-phosphate
  modified_base 6: mod_base = OTHER; note = 2'-O-methylguanosine-3'-phosphate
  modified_base 7: mod_base = OTHER; note = 2'-deoxy-2'-fluorouridine-3'-phosphate
  modified_base 8: mod_base = OTHER; note = 2'-O-methyluridine-3'-phosphate
  modified_base 9: mod_base = OTHER; note = 2'-deoxy-2'-fluoroadenosine-3'-phosphate
  modified_base 10: mod_base = OTHER; note = 2'-deoxy-2'-fluorocytidine-3'-phosphate
  modified_base 11: mod_base = OTHER; note = 2'-deoxy-2'-fluoroguanosine-3'-phosphate
  modified_base 12: mod_base = OTHER; note = 2'-O-methyluridine-3'-phosphate
  modified_base 13: mod_base = OTHER; note = 2'-O-methylguanosine-3'-phosphate
  modified_base 14: mod_base = OTHER; note = 2'-O-methylcytidine-3'-phosphate
  modified_base 15: mod_base = OTHER; note = 2'-O-methyluridine-3'-phosphate
  modified_base 16: mod_base = OTHER; note = 2'-O-methylcytidine-3'-phosphate
  modified_base 17: mod_base = OTHER; note = 2'-O-methyluridine-3'-phosphate
  modified_base 18: mod_base = OTHER; note = 2'-O-methylguanosine-3'-phosphate
  modified_base 19: mod_base = OTHER; note = 2'-O-methyluridine-3'-phosphate
  modified_base 20: mod_base = OTHER; note = 2'-O-methyluridine-3'-phosphate
  modified_base 21: mod_base = OTHER; note = 2'-O-methyluridine-3'-phosphate ((2S,4R)-1-[29-[[2-(acetylamino)-2-deoxy-beta-D-galactopyra nosyl]oxy]-14,14-bis[[3-[[3-[[5-[[2-(acetylamino)-2-deoxy-b eta-D-galactopyranosyl]oxy]-1-oxopentyl]amino]propyl]amino] -3-oxopropoxy]methyl]-1,12,19,25-tetraoxo-16-oxa-13,20,24-t riazanonacos-1-yl]-4-hydroxy-2-pyrrolidinyl)methyl ester
gacctgttacgtgctctgttt

SEQ ID NO: 295 - RNA, 21 nt, synthetic construct
  source 1..21: mol_type = other RNA
  modified_base 1: mod_base = OTHER; note = 2'-O-methyluridine-3'-phosphorothioate
  modified_base 2: mod_base = OTHER; note = 2'-O-methyladenosine-3'-phosphorothioate
  modified_base 3: mod_base = OTHER; note = 2'-O-methylcytidine-3'-phosphate
  modified_base 4: mod_base = OTHER; note = 2'-O-methylguanosine-3'-phosphate
  modified_base 5: mod_base = OTHER; note = 2'-O-methyluridine-3'-phosphate
  modified_base 6: mod_base = OTHER; note = 2'-O-methylguanosine-3'-phosphate
  modified_base 7: mod_base = OTHER; note = 2'-deoxy-2'-fluorocytidine-3'-phosphate
  modified_base 8: mod_base = OTHER; note = 2'-O-methyluridine-3'-phosphate
  modified_base 9: mod_base = OTHER; note = 2'-deoxy-2'-fluorocytidine-3'-phosphate
  modified_base 10: mod_base = OTHER; note = 2'-deoxy-2'-fluorouridine-3'-phosphate
  modified_base 11: mod_base = OTHER; note = 2'-deoxy-2'-fluoroguanosine-3'-phosphate
  modified_base 12: mod_base = OTHER; note = 2'-O-methyluridine-3'-phosphate
  modified_base 13: mod_base = OTHER; note = 2'-O-methyluridine-3'-phosphate
  modified_base 14: mod_base = OTHER; note = 2'-O-methylcytidine-3'-phosphate
  modified_base 15: mod_base = OTHER; note = 2'-O-methylcytidine-3'-phosphate
  modified_base 16: mod_base = OTHER; note = 2'-O-methylcytidine-3'-phosphate
  modified_base 17: mod_base = OTHER; note = 2'-O-methyladenosine-3'-phosphate
  modified_base 18: mod_base = OTHER; note = 2'-O-methyladenosine-3'-phosphate
  modified_base 19: mod_base = OTHER; note = 2'-O-methylguanosine-3'-phosphate
  modified_base 20: mod_base = OTHER; note = 2'-O-methylcytidine-3'-phosphate
  modified_base 21: mod_base = OTHER; note = 2'-O-methyluridine-3'-phosphate ((2S,4R)-1-[29-[[2-(acetylamino)-2-deoxy-beta-D-galactopyra nosyl]oxy]-14,14-bis[[3-[[3-[[5-[[2-(acetylamino)-2-deoxy-b eta-D-galactopyranosyl]oxy]-1-oxopentyl]amino]propyl]amino] -3-oxopropoxy]methyl]-1,12,19,25-tetraoxo-16-oxa-13,20,24-t riazanonacos-1-yl]-4-hydroxy-2-pyrrolidinyl)methyl ester
tacgtgctctgttcccaagct

SEQ ID NO: 296 - RNA, 21 nt, synthetic construct
  source 1..21: mol_type = other RNA
  modified_base 1: mod_base = OTHER; note = 2'-O-methylguanosine-3'-phosphorothioate
  modified_base 2: mod_base = OTHER; note = 2'-O-methylcytidine-3'-phosphorothioate
  modified_base 3: mod_base = OTHER; note = 2'-O-methyluridine-3'-phosphate
  modified_base 4: mod_base = OTHER; note = 2'-O-methylcytidine-3'-phosphate
  modified_base 5: mod_base = OTHER; note = 2'-O-methyluridine-3'-phosphate
  modified_base 6: mod_base = OTHER; note = 2'-O-methylguanosine-3'-phosphate
  modified_base 7: mod_base = OTHER; note = 2'-deoxy-2'-fluorouridine-3'-phosphate
  modified_base 8: mod_base = OTHER; note = 2'-O-methyluridine-3'-phosphate
  modified_base 9: mod_base = OTHER; note = 2'-deoxy-2'-fluorocytidine-3'-phosphate
  modified_base 10: mod_base = OTHER; note = 2'-deoxy-2'-fluorocytidine-3'-phosphate
  modified_base 11: mod_base = OTHER; note = 2'-deoxy-2'-fluorocytidine-3'-phosphate
  modified_base 12: mod_base = OTHER; note = 2'-O-methyladenosine-3'-phosphate
  modified_base 13: mod_base = OTHER; note = 2'-O-methyladenosine-3'-phosphate
  modified_base 14: mod_base = OTHER; note = 2'-O-methylguanosine-3'-phosphate
  modified_base 15: mod_base = OTHER; note = 2'-O-methylcytidine-3'-phosphate
  modified_base 16: mod_base = OTHER; note = 2'-O-methyluridine-3'-phosphate
  modified_base 17: mod_base = OTHER; note = 2'-O-methylguanosine-3'-phosphate
  modified_base 18: mod_base = OTHER; note = 2'-O-methylguanosine-3'-phosphate
  modified_base 19: mod_base = OTHER; note = 2'-O-methyluridine-3'-phosphate
  modified_base 20: mod_base = OTHER; note = 2'-O-methylcytidine-3'-phosphate
  modified_base 21: mod_base = OTHER; note = 2'-O-methyluridine-3'-phosphate ((2S,4R)-1-[29-[[2-(acetylamino)-2-deoxy-beta-D-galactopyra nosyl]oxy]-14,14-bis[[3-[[3-[[5-[[2-(acetylamino)-2-deoxy-b eta-D-galactopyranosyl]oxy]-1-oxopentyl]amino]propyl]amino] -3-oxopropoxy]methyl]-1,12,19,25-tetraoxo-16-oxa-13,20,24-t riazanonacos-1-yl]-4-hydroxy-2-pyrrolidinyl)methyl ester
gctctgttcccaagctggtct

SEQ ID NO: 297 - RNA, 21 nt, synthetic construct
  source 1..21: mol_type = other RNA
  modified_base 1: mod_base = OTHER; note = 2'-O-methylcytidine-3'-phosphorothioate
  modified_base 2: mod_base = OTHER; note = 2'-O-methyluridine-3'-phosphorothioate
  modified_base 3: mod_base = OTHER; note = 2'-O-methylguanosine-3'-phosphate
  modified_base 4: mod_base = OTHER; note = 2'-O-methylguanosine-3'-phosphate
  modified_base 5: mod_base = OTHER; note = 2'-O-methylcytidine-3'-phosphate
  modified_base 6: mod_base = OTHER; note = 2'-O-methyladenosine-3'-phosphate
  modified_base 7: mod_base = OTHER; note = 2'-deoxy-2'-fluoroguanosine-3'-phosphate
  modified_base 8: mod_base = OTHER; note = 2'-O-methyluridine-3'-phosphate
  modified_base 9: mod_base = OTHER; note = 2'-deoxy-2'-fluorocytidine-3'-phosphate
  modified_base 10: mod_base = OTHER; note = 2'-deoxy-2'-fluorocytidine-3'-phosphate
  modified_base 11: mod_base = OTHER; note = 2'-deoxy-2'-fluorocytidine-3'-phosphate
  modified_base 12: mod_base = OTHER; note = 2'-O-methyluridine-3'-phosphate
  modified_base 13: mod_base = OTHER; note = 2'-O-methylguanosine-3'-phosphate
  modified_base 14: mod_base = OTHER; note = 2'-O-methyladenosine-3'-phosphate
  modified_base 15: mod_base = OTHER; note = 2'-O-methylguanosine-3'-phosphate
  modified_base 16: mod_base = OTHER; note = 2'-O-methylcytidine-3'-phosphate
  modified_base 17: mod_base = OTHER; note = 2'-O-methyluridine-3'-phosphate
  modified_base 18: mod_base = OTHER; note = 2'-O-methyluridine-3'-phosphate
  modified_base 19: mod_base = OTHER; note = 2'-O-methyluridine-3'-phosphate
  modified_base 20: mod_base = OTHER; note = 2'-O-methylguanosine-3'-phosphate
  modified_base 21: mod_base = OTHER; note = 2'-O-methyluridine-3'-phosphate ((2S,4R)-1-[29-[[2-(acetylamino)-2-deoxy-beta-D-galactopyra nosyl]oxy]-14,14-bis[[3-[[3-[[5-[[2-(acetylamino)-2-deoxy-b eta-D-galactopyranosyl]oxy]-1-oxopentyl]amino]propyl]amino] -3-oxopropoxy]methyl]-1,12,19,25-tetraoxo-16-oxa-13,20,24-t riazanonacos-1-yl]-4-hydroxy-2-pyrrolidinyl)methyl ester
ctggcagtccctgagctttgt

SEQ ID NO: 298 - RNA, 21 nt, synthetic construct
  source 1..21: mol_type = other RNA
  modified_base 1: mod_base = OTHER; note = 2'-O-methylguanosine-3'-phosphorothioate
  modified_base 2: mod_base = OTHER; note = 2'-O-methyluridine-3'-phosphorothioate
  modified_base 3: mod_base = OTHER; note = 2'-O-methylcytidine-3'-phosphate
  modified_base 4: mod_base = OTHER; note = 2'-O-methylcytidine-3'-phosphate
  modified_base 5: mod_base = OTHER; note = 2'-O-methylcytidine-3'-phosphate
  modified_base 6: mod_base = OTHER; note = 2'-O-methyluridine-3'-phosphate
  modified_base 7: mod_base = OTHER; note = 2'-deoxy-2'-fluoroguanosine-3'-phosphate
  modified_base 8: mod_base = OTHER; note = 2'-O-methyladenosine-3'-phosphate
  modified_base 9: mod_base = OTHER; note = 2'-deoxy-2'-fluoroguanosine-3'-phosphate
  modified_base 10: mod_base = OTHER; note = 2'-deoxy-2'-fluorocytidine-3'-phosphate
  modified_base 11: mod_base = OTHER; note = 2'-deoxy-2'-fluorouridine-3'-phosphate
  modified_base 12: mod_base = OTHER; note = 2'-O-methyluridine-3'-phosphate
  modified_base 13: mod_base = OTHER; note = 2'-O-methyluridine-3'-phosphate
  modified_base 14: mod_base = OTHER; note = 2'-O-methylguanosine-3'-phosphate
  modified_base 15: mod_base = OTHER; note = 2'-O-methyladenosine-3'-phosphate
  modified_base 16: mod_base = OTHER; note = 2'-O-methyluridine-3'-phosphate
  modified_base 17: mod_base = OTHER; note = 2'-O-methylguanosine-3'-phosphate
  modified_base 18: mod_base = OTHER; note = 2'-O-methylguanosine-3'-phosphate
  modified_base 19: mod_base = OTHER; note = 2'-O-methylcytidine-3'-phosphate
  modified_base 20: mod_base = OTHER; note = 2'-O-methylguanosine-3'-phosphate
  modified_base 21: mod_base = OTHER; note = 2'-O-methyluridine-3'-phosphate ((2S,4R)-1-[29-[[2-(acetylamino)-2-deoxy-beta-D-galactopyra nosyl]oxy]-14,14-bis[[3-[[3-[[5-[[2-(acetylamino)-2-deoxy-b eta-D-galactopyranosyl]oxy]-1-oxopentyl]amino]propyl]amino] -3-oxopropoxy]methyl]-1,12,19,25-tetraoxo-16-oxa-13,20,24-t riazanonacos-1-yl]-4-hydroxy-2-pyrrolidinyl)methyl ester
gtccctgagctttgatggcgt

SEQ ID NO: 299 - RNA, 21 nt, synthetic construct
  source 1..21: mol_type = other RNA
  modified_base 1: mod_base = OTHER; note = 2'-O-methylguanosine-3'-phosphorothioate
  modified_base 2: mod_base = OTHER; note = 2'-O-methylcytidine-3'-phosphorothioate
  modified_base 3: mod_base = OTHER; note = 2'-O-methylcytidine-3'-phosphate
  modified_base 4: mod_base = OTHER; note = 2'-O-methyluridine-3'-phosphate
  modified_base 5: mod_base = OTHER; note = 2'-O-methyluridine-3'-phosphate
  modified_base 6: mod_base = OTHER; note = 2'-O-methylcytidine-3'-phosphate
  modified_base 7: mod_base = OTHER; note = 2'-deoxy-2'-fluorocytidine-3'-phosphate
  modified_base 8: mod_base = OTHER; note = 2'-O-methyladenosine-3'-phosphate
  modified_base 9: mod_base = OTHER; note = 2'-deoxy-2'-fluorocytidine-3'-phosphate
  modified_base 10: mod_base = OTHER; note = 2'-deoxy-2'-fluorocytidine-3'-phosphate
  modified_base 11: mod_base = OTHER; note = 2'-deoxy-2'-fluorouridine-3'-phosphate
  modified_base 12: mod_base = OTHER; note = 2'-O-methyluridine-3'-phosphate
  modified_base 13: mod_base = OTHER; note = 2'-O-methyladenosine-3'-phosphate
  modified_base 14: mod_base = OTHER; note = 2'-O-methyladenosine-3'-phosphate
  modified_base 15: mod_base = OTHER; note = 2'-O-methylguanosine-3'-phosphate
  modified_base 16: mod_base = OTHER; note = 2'-O-methylguanosine-3'-phosphate
  modified_base 17: mod_base = OTHER; note = 2'-O-methylguanosine-3'-phosphate
  modified_base 18: mod_base = OTHER; note = 2'-O-methylcytidine-3'-phosphate
  modified_base 19: mod_base = OTHER; note = 2'-O-methyladenosine-3'-phosphate
  modified_base 20: mod_base = OTHER; note = 2'-O-methylcytidine-3'-phosphate
  modified_base 21: mod_base = OTHER; note = 2'-O-methyluridine-3'-phosphate ((2S,4R)-1-[29-[[2-(acetylamino)-2-deoxy-beta-D-galactopyra nosyl]oxy]-14,14-bis[[3-[[3-[[5-[[2-(acetylamino)-2-deoxy-b eta-D-galactopyranosyl]oxy]-1-oxopentyl]amino]propyl]amino] -3-oxopropoxy]methyl]-1,12,19,25-tetraoxo-16-oxa-13,20,24-t riazanonacos-1-yl]-4-hydroxy-2-pyrrolidinyl)methyl ester
gccttccaccttaagggcact

SEQ ID NO: 300 - RNA, 21 nt, synthetic construct
  source 1..21: mol_type = other RNA
  modified_base 1: mod_base = OTHER; note = 2'-O-methylcytidine-3'-phosphorothioate
  modified_base 2: mod_base = OTHER; note = 2'-O-methyladenosine-3'-phosphorothioate
  modified_base 3: mod_base = OTHER; note = 2'-O-methylcytidine-3'-phosphate
  modified_base 4: mod_base = OTHER; note = 2'-O-methylcytidine-3'-phosphate
  modified_base 5: mod_base = OTHER; note = 2'-O-methyluridine-3'-phosphate
  modified_base 6: mod_base = OTHER; note = 2'-O-methyluridine-3'-phosphate
  modified_base 7: mod_base = OTHER; note = 2'-deoxy-2'-fluoroadenosine-3'-phosphate
  modified_base 8: mod_base = OTHER; note = 2'-O-methyladenosine-3'-phosphate
  modified_base 9: mod_base = OTHER; note = 2'-deoxy-2'-fluoroguanosine-3'-phosphate
  modified_base 10: mod_base = OTHER; note = 2'-deoxy-2'-fluoroguanosine-3'-phosphate
  modified_base 11: mod_base = OTHER; note = 2'-deoxy-2'-fluoroguanosine-3'-phosphate
  modified_base 12: mod_base = OTHER; note = 2'-O-methylcytidine-3'-phosphate
  modified_base 13: mod_base = OTHER; note = 2'-O-methyladenosine-3'-phosphate
  modified_base 14: mod_base = OTHER; note = 2'-O-methylcytidine-3'-phosphate
  modified_base 15: mod_base = OTHER; note = 2'-O-methyladenosine-3'-phosphate
  modified_base 16: mod_base = OTHER; note = 2'-O-methylguanosine-3'-phosphate
  modified_base 17: mod_base = OTHER; note = 2'-O-methylguanosine-3'-phosphate
  modified_base 18: mod_base = OTHER; note = 2'-O-methyladenosine-3'-phosphate
  modified_base 19: mod_base = OTHER; note = 2'-O-methylguanosine-3'-phosphate
  modified_base 20: mod_base = OTHER; note = 2'-O-methyladenosine-3'-phosphate
  modified_base 21: mod_base = OTHER; note = 2'-O-methyluridine-3'-phosphate ((2S,4R)-1-[29-[[2-(acetylamino)-2-deoxy-beta-D-galactopyra nosyl]oxy]-14,14-bis[[3-[[3-[[5-[[2-(acetylamino)-2-deoxy-b eta-D-galactopyranosyl]oxy]-1-oxopentyl]amino]propyl]amino] -3-oxopropoxy]methyl]-1,12,19,25-tetraoxo-16-oxa-13,20,24-t riazanonacos-1-yl]-4-hydroxy-2-pyrrolidinyl)methyl ester
caccttaagggcacaggagat

SEQ ID NO: 301 - RNA, 21 nt, synthetic construct
  source 1..21: mol_type = other RNA
  modified_base 1: mod_base = OTHER; note = 2'-O-methylguanosine-3'-phosphorothioate
  modified_base 2: mod_base = OTHER; note = 2'-O-methylguanosine-3'-phosphorothioate
  modified_base 3: mod_base = OTHER; note = 2'-O-methylguanosine-3'-phosphate
  modified_base 4: mod_base = OTHER; note = 2'-O-methylcytidine-3'-phosphate
  modified_base 5: mod_base = OTHER; note = 2'-O-methyladenosine-3'-phosphate
  modified_base 6: mod_base = OTHER; note = 2'-O-methylcytidine-3'-phosphate
  modified_base 7: mod_base = OTHER; note = 2'-deoxy-2'-fluoroadenosine-3'-phosphate
  modified_base 8: mod_base = OTHER; note = 2'-O-methylguanosine-3'-phosphate
  modified_base 9: mod_base = OTHER; note = 2'-deoxy-2'-fluoroguanosine-3'-phosphate
  modified_base 10: mod_base = OTHER; note = 2'-deoxy-2'-fluoroadenosine-3'-phosphate
  modified_base 11: mod_base = OTHER; note = 2'-deoxy-2'-fluoroguanosine-3'-phosphate
  modified_base 12: mod_base = OTHER; note = 2'-O-methyladenosine-3'-phosphate
  modified_base 13: mod_base = OTHER; note = 2'-O-methylguanosine-3'-phosphate
  modified_base 14: mod_base = OTHER; note = 2'-O-methylcytidine-3'-phosphate
  modified_base 15: mod_base = OTHER; note = 2'-O-methyluridine-3'-phosphate
  modified_base 16: mod_base = OTHER; note = 2'-O-methylguanosine-3'-phosphate
  modified_base 17: mod_base = OTHER; note = 2'-O-methyladenosine-3'-phosphate
  modified_base 18: mod_base = OTHER; note = 2'-O-methylcytidine-3'-phosphate
  modified_base 19: mod_base = OTHER; note = 2'-O-methyladenosine-3'-phosphate
  modified_base 20: mod_base = OTHER; note = 2'-O-methylcytidine-3'-phosphate
  modified_base 21: mod_base = OTHER; note = 2'-O-methyluridine-3'-phosphate ((2S,4R)-1-[29-[[2-(acetylamino)-2-deoxy-beta-D-galactopyra nosyl]oxy]-14,14-bis[[3-[[3-[[5-[[2-(acetylamino)-2-deoxy-b eta-D-galactopyranosyl]oxy]-1-oxopentyl]amino]propyl]amino] -3-oxopropoxy]methyl]-1,12,19,25-tetraoxo-16-oxa-13,20,24-t riazanonacos-1-yl]-4-hydroxy-2-pyrrolidinyl)methyl ester
gggcacaggagagctgacact

SEQ ID NO: 302 - RNA, 21 nt, synthetic construct
  source 1..21: mol_type = other RNA
  modified_base 1: mod_base = OTHER; note = 2'-O-methylguanosine-3'-phosphorothioate
  modified_base 2: mod_base = OTHER; note = 2'-O-methylguanosine-3'-phosphorothioate
  modified_base 3: mod_base = OTHER; note = 2'-O-methyladenosine-3'-phosphate
  modified_base 4: mod_base = OTHER; note = 2'-O-methylguanosine-3'-phosphate
  modified_base 5: mod_base = OTHER; note = 2'-O-methyladenosine-3'-phosphate
  modified_base 6: mod_base = OTHER; note = 2'-O-methylguanosine-3'-phosphate
  modified_base 7: mod_base = OTHER; note = 2'-deoxy-2'-fluorocytidine-3'-phosphate
  modified_base 8: mod_base = OTHER; note = 2'-O-methyluridine-3'-phosphate
  modified_base 9: mod_base = OTHER; note = 2'-deoxy-2'-fluoroguanosine-3'-phosphate
  modified_base 10: mod_base = OTHER; note = 2'-deoxy-2'-fluoroadenosine-3'-phosphate
  modified_base 11: mod_base = OTHER; note = 2'-deoxy-2'-fluorocytidine-3'-phosphate
  modified_base 12: mod_base = OTHER; note = 2'-O-methyladenosine-3'-phosphate
  modified_base 13: mod_base = OTHER; note = 2'-O-methylcytidine-3'-phosphate
  modified_base 14: mod_base = OTHER; note = 2'-O-methylguanosine-3'-phosphate
  modified_base 15: mod_base = OTHER; note = 2'-O-methylguanosine-3'-phosphate
  modified_base 16: mod_base = OTHER; note = 2'-O-methylguanosine-3'-phosphate
  modified_base 17: mod_base = OTHER; note = 2'-O-methylcytidine-3'-phosphate
  modified_base 18: mod_base = OTHER; note = 2'-O-methylcytidine-3'-phosphate
  modified_base 19: mod_base = OTHER; note = 2'-O-methyluridine-3'-phosphate
  modified_base 20: mod_base = OTHER; note = 2'-O-methyluridine-3'-phosphate
  modified_base 21: mod_base = OTHER; note = 2'-O-methyluridine-3'-phosphate ((2S,4R)-1-[29-[[2-(acetylamino)-2-deoxy-beta-D-galactopyra nosyl]oxy]-14,14-bis[[3-[[3-[[5-[[2-(acetylamino)-2-deoxy-b eta-D-galactopyranosyl]oxy]-1-oxopentyl]amino]propyl]amino] -3-oxopropoxy]methyl]-1,12,19,25-tetraoxo-16-oxa-13,20,24-t riazanonacos-1-yl]-4-hydroxy-2-pyrrolidinyl)methyl ester
ggagagctgacacgggccttt

SEQ ID NO: 303 - RNA, 21 nt, synthetic construct
  source 1..21: mol_type = other RNA
  modified_base 1: mod_base = OTHER; note = 2'-O-methylguanosine-3'-phosphorothioate
  modified_base 2: mod_base = OTHER; note = 2'-O-methyladenosine-3'-phosphorothioate
  modified_base 3: mod_base = OTHER; note = 2'-O-methylcytidine-3'-phosphate
  modified_base 4: mod_base = OTHER; note = 2'-O-methyladenosine-3'-phosphate
  modified_base 5: mod_base = OTHER; note = 2'-O-methylcytidine-3'-phosphate
  modified_base 6: mod_base = OTHER; note = 2'-O-methylguanosine-3'-phosphate
  modified_base 7: mod_base = OTHER; note = 2'-deoxy-2'-fluoroguanosine-3'-phosphate
  modified_base 8: mod_base = OTHER; note = 2'-O-methylguanosine-3'-phosphate
  modified_base 9: mod_base = OTHER; note = 2'-deoxy-2'-fluorocytidine-3'-phosphate
  modified_base 10: mod_base = OTHER; note = 2'-deoxy-2'-fluorocytidine-3'-phosphate
  modified_base 11: mod_base = OTHER; note = 2'-deoxy-2'-fluorouridine-3'-phosphate
  modified_base 12: mod_base = OTHER; note = 2'-O-methyluridine-3'-phosphate
  modified_base 13: mod_base = OTHER; note = 2'-O-methylguanosine-3'-phosphate
  modified_base 14: mod_base = OTHER; note = 2'-O-methylcytidine-3'-phosphate
  modified_base 15: mod_base = OTHER; note = 2'-O-methyluridine-3'-phosphate
  modified_base 16: mod_base = OTHER; note = 2'-O-methylguanosine-3'-phosphate
  modified_base 17: mod_base = OTHER; note = 2'-O-methylguanosine-3'-phosphate
  modified_base 18: mod_base = OTHER; note = 2'-O-methyluridine-3'-phosphate
  modified_base 19: mod_base = OTHER; note = 2'-O-methyluridine-3'-phosphate
  modified_base 20: mod_base = OTHER; note = 2'-O-methylcytidine-3'-phosphate
  modified_base 21: mod_base = OTHER; note = 2'-O-methyluridine-3'-phosphate ((2S,4R)-1-[29-[[2-(acetylamino)-2-deoxy-beta-D-galactopyra nosyl]oxy]-14,14-bis[[3-[[3-[[5-[[2-(acetylamino)-2-deoxy-b eta-D-galactopyranosyl]oxy]-1-oxopentyl]amino]propyl]amino] -3-oxopropoxy]methyl]-1,12,19,25-tetraoxo-16-oxa-13,20,24-t riazanonacos-1-yl]-4-hydroxy-2-pyrrolidinyl)methyl ester
gacacgggccttgctggttct

SEQ ID NO: 304 - RNA, 21 nt, synthetic construct
  source 1..21: mol_type = other RNA
  modified_base 1: mod_base = OTHER; note = 2'-O-methylcytidine-3'-phosphorothioate
  modified_base 2: mod_base = OTHER; note = 2'-O-methyluridine-3'-phosphorothioate
  modified_base 3: mod_base = OTHER; note = 2'-O-methyluridine-3'-phosphate
  modified_base 4: mod_base = OTHER; note = 2'-O-methylguanosine-3'-phosphate
  modified_base 5: mod_base = OTHER; note = 2'-O-methylcytidine-3'-phosphate
  modified_base 6: mod_base = OTHER; note = 2'-O-methyluridine-3'-phosphate
  modified_base 7: mod_base = OTHER; note = 2'-deoxy-2'-fluoroguanosine-3'-phosphate
  modified_base 8: mod_base = OTHER; note = 2'-O-methylguanosine-3'-phosphate
  modified_base 9: mod_base = OTHER; note = 2'-deoxy-2'-fluorouridine-3'-phosphate
  modified_base 10: mod_base = OTHER; note = 2'-deoxy-2'-fluorouridine-3'-phosphate
  modified_base 11: mod_base = OTHER; note = 2'-deoxy-2'-fluorocytidine-3'-phosphate
  modified_base 12: mod_base = OTHER; note = 2'-O-methyluridine-3'-phosphate
  modified_base 13: mod_base = OTHER; note = 2'-O-methylcytidine-3'-phosphate
  modified_base 14: mod_base = OTHER; note = 2'-O-methylcytidine-3'-phosphate
  modified_base 15: mod_base = OTHER; note = 2'-O-methylguanosine-3'-phosphate
  modified_base 16: mod_base = OTHER; note = 2'-O-methylguanosine-3'-phosphate
  modified_base 17: mod_base = OTHER; note = 2'-O-methylcytidine-3'-phosphate
  modified_base 18: mod_base = OTHER; note = 2'-O-methyluridine-3'-phosphate
  modified_base 19: mod_base = OTHER; note = 2'-O-methylguanosine-3'-phosphate
  modified_base 20: mod_base = OTHER; note = 2'-O-methyluridine-3'-phosphate
  modified_base 21: mod_base = OTHER; note = 2'-O-methyluridine-3'-phosphate ((2S,4R)-1-[29-[[2-(acetylamino)-2-deoxy-beta-D-galactopyra nosyl]oxy]-14,14-bis[[3-[[3-[[5-[[2-(acetylamino)-2-deoxy-b eta-D-galactopyranosyl]oxy]-1-oxopentyl]amino]propyl]amino] -3-oxopropoxy]methyl]-1,12,19,25-tetraoxo-16-oxa-13,20,24-t riazanonacos-1-yl]-4-hydroxy-2-pyrrolidinyl)methyl ester
cttgctggttctccggctgtt

SEQ ID NO: 305 - RNA, 21 nt, synthetic construct
  source 1..21: mol_type = other RNA
  modified_base 1: mod_base = OTHER; note = 2'-O-methylguanosine-3'-phosphorothioate
  modified_base 2: mod_base = OTHER; note = 2'-O-methylguanosine-3'-phosphorothioate
  modified_base 3: mod_base = OTHER; note = 2'-O-methyluridine-3'-phosphate
  modified_base 4: mod_base = OTHER; note = 2'-O-methyluridine-3'-phosphate
  modified_base 5: mod_base = OTHER; note = 2'-O-methylcytidine-3'-phosphate
  modified_base 6: mod_base = OTHER; note = 2'-O-methyluridine-3'-phosphate
  modified_base 7: mod_base = OTHER; note = 2'-deoxy-2'-fluorocytidine-3'-phosphate
  modified_base 8: mod_base = OTHER; note = 2'-O-methylcytidine-3'-phosphate
  modified_base 9: mod_base = OTHER; note = 2'-deoxy-2'-fluoroguanosine-3'-phosphate
  modified_base 10: mod_base = OTHER; note = 2'-deoxy-2'-fluoroguanosine-3'-phosphate
  modified_base 11: mod_base = OTHER; note = 2'-deoxy-2'-fluorocytidine-3'-phosphate
  modified_base 12: mod_base = OTHER; note = 2'-O-methyluridine-3'-phosphate
  modified_base 13: mod_base = OTHER; note = 2'-O-methylguanosine-3'-phosphate
  modified_base 14: mod_base = OTHER; note = 2'-O-methyluridine-3'-phosphate
  modified_base 15: mod_base = OTHER; note = 2'-O-methylguanosine-3'-phosphate
  modified_base 16: mod_base = OTHER; note = 2'-O-methyluridine-3'-phosphate
  modified_base 17: mod_base = OTHER; note = 2'-O-methylguanosine-3'-phosphate
  modified_base 18: mod_base = OTHER; note = 2'-O-methylcytidine-3'-phosphate
  modified_base 19: mod_base = OTHER; note = 2'-O-methylcytidine-3'-phosphate
  modified_base 20: mod_base = OTHER; note = 2'-O-methyluridine-3'-phosphate
  modified_base 21: mod_base = OTHER; note = 2'-O-methyluridine-3'-phosphate ((2S,4R)-1-[29-[[2-(acetylamino)-2-deoxy-beta-D-galactopyra nosyl]oxy]-14,14-bis[[3-[[3-[[5-[[2-(acetylamino)-2-deoxy-b eta-D-galactopyranosyl]oxy]-1-oxopentyl]amino]propyl]amino] -3-oxopropoxy]methyl]-1,12,19,25-tetraoxo-16-oxa-13,20,24-t riazanonacos-1-yl]-4-hydroxy-2-pyrrolidinyl)methyl ester
ggttctccggctgtgtgcctt

SEQ ID NO: 306 - RNA, 21 nt, synthetic construct
  source 1..21: mol_type = other RNA
  modified_base 1: mod_base = OTHER; note = 2'-O-methylcytidine-3'-phosphorothioate
  modified_base 2: mod_base = OTHER; note = 2'-O-methyluridine-3'-phosphorothioate
  modified_base 3: mod_base = OTHER; note = 2'-O-methylcytidine-3'-phosphate
  modified_base 4: mod_base = OTHER; note = 2'-O-methylguanosine-3'-phosphate
  modified_base 5: mod_base = OTHER; note = 2'-O-methyluridine-3'-phosphate
  modified_base 6: mod_base = OTHER; note = 2'-O-methylcytidine-3'-phosphate
  modified_base 7: mod_base = OTHER; note = 2'-deoxy-2'-fluoroadenosine-3'-phosphate
  modified_base 8: mod_base = OTHER; note = 2'-O-methylcytidine-3'-phosphate
  modified_base 9: mod_base = OTHER; note = 2'-deoxy-2'-fluorouridine-3'-phosphate
  modified_base 10: mod_base = OTHER; note = 2'-deoxy-2'-fluorocytidine-3'-phosphate
  modified_base 11: mod_base = OTHER; note = 2'-deoxy-2'-fluoroadenosine-3'-phosphate
  modified_base 12: mod_base = OTHER; note = 2'-O-methylcytidine-3'-phosphate
  modified_base 13: mod_base = OTHER; note = 2'-O-methylguanosine-3'-phosphate
  modified_base 14: mod_base = OTHER; note = 2'-O-methylguanosine-3'-phosphate
  modified_base 15: mod_base = OTHER; note = 2'-O-methylguanosine-3'-phosphate
  modified_base 16: mod_base = OTHER; note = 2'-O-methylcytidine-3'-phosphate
  modified_base 17: mod_base = OTHER; note = 2'-O-methyluridine-3'-phosphate
  modified_base 18: mod_base = OTHER; note = 2'-O-methylguanosine-3'-phosphate
  modified_base 19: mod_base = OTHER; note = 2'-O-methyluridine-3'-phosphate
  modified_base 20: mod_base = OTHER; note = 2'-O-methyluridine-3'-phosphate
  modified_base 21: mod_base = OTHER; note = 2'-O-methyluridine-3'-phosphate ((2S,4R)-1-[29-[[2-(acetylamino)-2-deoxy-beta-D-galactopyra nosyl]oxy]-14,14-bis[[3-[[3-[[5-[[2-(acetylamino)-2-deoxy-b eta-D-galactopyranosyl]oxy]-1-oxopentyl]amino]propyl]amino] -3-oxopropoxy]methyl]-1,12,19,25-tetraoxo-16-oxa-13,20,24-t riazanonacos-1-yl]-4-hydroxy-2-pyrrolidinyl)methyl ester
ctcgtcactcacgggctgttt

SEQ ID NO: 307 - RNA, 21 nt, synthetic construct
  source 1..21: mol_type = other RNA
  modified_base 1: mod_base = OTHER; note = 2'-O-methylcytidine-3'-phosphorothioate
  modified_base 2: mod_base = OTHER; note = 2'-O-methyluridine-3'-phosphorothioate
  modified_base 3: mod_base = OTHER; note = 2'-O-methylcytidine-3'-phosphate
  modified_base 4: mod_base = OTHER; note = 2'-O-methyladenosine-3'-phosphate
  modified_base 5: mod_base = OTHER; note = 2'-O-methylcytidine-3'-phosphate
  modified_base 6: mod_base = OTHER; note = 2'-O-methylguanosine-3'-phosphate
  modified_base 7: mod_base = OTHER; note = 2'-deoxy-2'-fluoroguanosine-3'-phosphate
  modified_base 8: mod_base = OTHER; note = 2'-O-methylguanosine-3'-phosphate
  modified_base 9: mod_base = OTHER; note = 2'-deoxy-2'-fluorocytidine-3'-phosphate
  modified_base 10: mod_base = OTHER; note = 2'-deoxy-2'-fluorouridine-3'-phosphate
  modified_base 11: mod_base = OTHER; note = 2'-deoxy-2'-fluoroguanosine-3'-phosphate
  modified_base 12: mod_base = OTHER; note = 2'-O-methyluridine-3'-phosphate
  modified_base 13: mod_base = OTHER; note = 2'-O-methyluridine-3'-phosphate
  modified_base 14: mod_base = OTHER; note = 2'-O-methylguanosine-3'-phosphate
  modified_base 15: mod_base = OTHER; note = 2'-O-methylcytidine-3'-phosphate
  modified_base 16: mod_base = OTHER; note = 2'-O-methyluridine-3'-phosphate
  modified_base 17: mod_base = OTHER; note = 2'-O-methylcytidine-3'-phosphate
  modified_base 18: mod_base = OTHER; note = 2'-O-methylcytidine-3'-phosphate
  modified_base 19: mod_base = OTHER; note = 2'-O-methyladenosine-3'-phosphate
  modified_base 20: mod_base = OTHER; note = 2'-O-methylguanosine-3'-phosphate
  modified_base 21: mod_base = OTHER; note = 2'-O-methyluridine-3'-phosphate ((2S,4R)-1-[29-[[2-(acetylamino)-2-deoxy-beta-D-galactopyra nosyl]oxy]-14,14-bis[[3-[[3-[[5-[[2-(acetylamino)-2-deoxy-b eta-D-galactopyranosyl]oxy]-1-oxopentyl]amino]propyl]amino] -3-oxopropoxy]methyl]-1,12,19,25-tetraoxo-16-oxa-13,20,24-t riazanonacos-1-yl]-4-hydroxy-2-pyrrolidinyl)methyl ester
ctcacgggctgttgctccagt

SEQ ID NO: 308 - RNA, 21 nt, synthetic construct
  source 1..21: mol_type = other RNA
  modified_base 1: mod_base = OTHER; note = 2'-O-methyluridine-3'-phosphorothioate
  modified_base 2: mod_base = OTHER; note = 2'-O-methyluridine-3'-phosphorothioate
  modified_base 3: mod_base = OTHER; note = 2'-O-methylguanosine-3'-phosphate
  modified_base 4: mod_base = OTHER; note = 2'-O-methylcytidine-3'-phosphate
  modified_base 5: mod_base = OTHER; note = 2'-O-methyluridine-3'-phosphate
  modified_base 6: mod_base = OTHER; note = 2'-O-methylcytidine-3'-phosphate
  modified_base 7: mod_base = OTHER; note = 2'-deoxy-2'-fluorocytidine-3'-phosphate
  modified_base 8: mod_base = OTHER; note = 2'-O-methyladenosine-3'-phosphate
  modified_base 9: mod_base = OTHER; note = 2'-deoxy-2'-fluoroguanosine-3'-phosphate
  modified_base 10: mod_base = OTHER; note = 2'-deoxy-2'-fluoroguanosine-3'-phosphate
  modified_base 11: mod_base = OTHER; note = 2'-deoxy-2'-fluorocytidine-3'-phosphate
  modified_base 12: mod_base = OTHER; note = 2'-O-methylcytidine-3'-phosphate
  modified_base 13: mod_base = OTHER; note = 2'-O-methyluridine-3'-phosphate
  modified_base 14: mod_base = OTHER; note = 2'-O-methylguanosine-3'-phosphate
  modified_base 15: mod_base = OTHER; note = 2'-O-methylguanosine-3'-phosphate
  modified_base 16: mod_base = OTHER; note = 2'-O-methyluridine-3'-phosphate
  modified_base 17: mod_base = OTHER; note = 2'-O-methylcytidine-3'-phosphate
  modified_base 18: mod_base = OTHER; note = 2'-O-methyluridine-3'-phosphate
  modified_base 19: mod_base = OTHER; note = 2'-O-methylcytidine-3'-phosphate
  modified_base 20: mod_base = OTHER; note = 2'-O-methylguanosine-3'-phosphate
  modified_base 21: mod_base = OTHER; note = 2'-O-methyluridine-3'-phosphate ((2S,4R)-1-[29-[[2-(acetylamino)-2-deoxy-beta-D-galactopyra nosyl]oxy]-14,14-bis[[3-[[3-[[5-[[2-(acetylamino)-2-deoxy-b eta-D-galactopyranosyl]oxy]-1-oxopentyl]amino]propyl]amino] -3-oxopropoxy]methyl]-1,12,19,25-tetraoxo-16-oxa-13,20,24-t riazanonacos-1-yl]-4-hydroxy-2-pyrrolidinyl)methyl ester
ttgctccaggcctggtctcgt

SEQ ID NO: 309 - RNA, 21 nt, synthetic construct
  source 1..21: mol_type = other RNA
  modified_base 1: mod_base = OTHER; note = 2'-O-methylguanosine-3'-phosphorothioate
  modified_base 2: mod_base = OTHER; note = 2'-O-methylguanosine-3'-phosphorothioate
  modified_base 3: mod_base = OTHER; note = 2'-O-methylcytidine-3'-phosphate
  modified_base 4: mod_base = OTHER; note = 2'-O-methyluridine-3'-phosphate
  modified_base 5: mod_base = OTHER; note = 2'-O-methylcytidine-3'-phosphate
  modified_base 6: mod_base = OTHER; note = 2'-O-methyluridine-3'-phosphate
  modified_base 7: mod_base = OTHER; note = 2'-deoxy-2'-fluorocytidine-3'-phosphate
  modified_base 8: mod_base = OTHER; note = 2'-O-methyladenosine-3'-phosphate
  modified_base 9: mod_base = OTHER; note = 2'-deoxy-2'-fluoroguanosine-3'-phosphate
  modified_base 10: mod_base = OTHER; note = 2'-deoxy-2'-fluoroguanosine-3'-phosphate
  modified_base 11: mod_base = OTHER; note = 2'-deoxy-2'-fluorocytidine-3'-phosphate
  modified_base 12: mod_base = OTHER; note = 2'-O-methylguanosine-3'-phosphate
  modified_base 13: mod_base = OTHER; note = 2'-O-methylcytidine-3'-phosphate
  modified_base 14: mod_base = OTHER; note = 2'-O-methyladenosine-3'-phosphate
  modified_base 15: mod_base = OTHER; note = 2'-O-methyluridine-3'-phosphate
  modified_base 16: mod_base = OTHER; note = 2'-O-methyluridine-3'-phosphate
  modified_base 17: mod_base = OTHER; note = 2'-O-methyluridine-3'-phosphate
  modified_base 18: mod_base = OTHER; note = 2'-O-methylcytidine-3'-phosphate
  modified_base 19: mod_base = OTHER; note = 2'-O-methyluridine-3'-phosphate
  modified_base 20: mod_base = OTHER; note = 2'-O-methylcytidine-3'-phosphate
  modified_base 21: mod_base = OTHER; note = 2'-O-methyluridine-3'-phosphate ((2S,4R)-1-[29-[[2-(acetylamino)-2-deoxy-beta-D-galactopyra nosyl]oxy]-14,14-bis[[3-[[3-[[5-[[2-(acetylamino)-2-deoxy-b eta-D-galactopyranosyl]oxy]-1-oxopentyl]amino]propyl]amino] -3-oxopropoxy]methyl]-1,12,19,25-tetraoxo-16-oxa-13,20,24-t riazanonacos-1-yl]-4-hydroxy-2-pyrrolidinyl)methyl ester
ggctctcaggcgcatttctct

SEQ ID NO: 310 - RNA, 21 nt, synthetic construct
  source 1..21: mol_type = other RNA
  modified_base 1: mod_base = OTHER; note = 2'-O-methyluridine-3'-phosphorothioate
  modified_base 2: mod_base = OTHER; note = 2'-O-methylcytidine-3'-phosphorothioate
  modified_base 3: mod_base = OTHER; note = 2'-O-methyladenosine-3'-phosphate
  modified_base 4: mod_base = OTHER; note = 2'-O-methylguanosine-3'-phosphate
  modified_base 5: mod_base = OTHER; note = 2'-O-methylguanosine-3'-phosphate
  modified_base 6: mod_base = OTHER; note = 2'-O-methylcytidine-3'-phosphate
  modified_base 7: mod_base = OTHER; note = 2'-deoxy-2'-fluoroguanosine-3'-phosphate
  modified_base 8: mod_base = OTHER; note = 2'-O-methylcytidine-3'-phosphate
  modified_base 9: mod_base = OTHER; note = 2'-deoxy-2'-fluoroadenosine-3'-phosphate
  modified_base 10: mod_base = OTHER; note = 2'-deoxy-2'-fluorouridine-3'-phosphate
  modified_base 11: mod_base = OTHER; note = 2'-deoxy-2'-fluorouridine-3'-phosphate
  modified_base 12: mod_base = OTHER; note = 2'-O-methyluridine-3'-phosphate
  modified_base 13: mod_base = OTHER; note = 2'-O-methylcytidine-3'-phosphate
  modified_base 14: mod_base = OTHER; note = 2'-O-methyluridine-3'-phosphate
  modified_base 15: mod_base = OTHER; note = 2'-O-methylcytidine-3'-phosphate
  modified_base 16: mod_base = OTHER; note = 2'-O-methylcytidine-3'-phosphate
  modified_base 17: mod_base = OTHER; note = 2'-O-methylguanosine-3'-phosphate
  modified_base 18: mod_base = OTHER; note = 2'-O-methyladenosine-3'-phosphate
  modified_base 19: mod_base = OTHER; note = 2'-O-methylguanosine-3'-phosphate
  modified_base 20: mod_base = OTHER; note = 2'-O-methylcytidine-3'-phosphate
  modified_base 21: mod_base = OTHER; note = 2'-O-methyluridine-3'-phosphate ((2S,4R)-1-[29-[[2-(acetylamino)-2-deoxy-beta-D-galactopyra nosyl]oxy]-14,14-bis[[3-[[3-[[5-[[2-(acetylamino)-2-deoxy-b eta-D-galactopyranosyl]oxy]-1-oxopentyl]amino]propyl]amino] -3-oxopropoxy]methyl]-1,12,19,25-tetraoxo-16-oxa-13,20,24-t riazanonacos-1-yl]-4-hydroxy-2-pyrrolidinyl)methyl ester
tcaggcgcatttctccgagct

SEQ ID NO: 311 - RNA, 21 nt, synthetic construct
  source 1..21: mol_type = other RNA
  modified_base 1: mod_base = OTHER; note = 2'-O-methylcytidine-3'-phosphorothioate
  modified_base 2: mod_base = OTHER; note = 2'-O-methylguanosine-3'-phosphorothioate
  modified_base 3: mod_base = OTHER; note = 2'-O-methylcytidine-3'-phosphate
  modified_base 4: mod_base = OTHER; note = 2'-O-methyladenosine-3'-phosphate
  modified_base 5: mod_base = OTHER; note = 2'-O-methyluridine-3'-phosphate
  modified_base 6: mod_base = OTHER; note = 2'-O-methyluridine-3'-phosphate
  modified_base 7: mod_base = OTHER; note = 2'-deoxy-2'-fluorouridine-3'-phosphate
  modified_base 8: mod_base = OTHER; note = 2'-O-methylcytidine-3'-phosphate
  modified_base 9: mod_base = OTHER; note = 2'-deoxy-2'-fluorouridine-3'-phosphate
  modified_base 10: mod_base = OTHER; note = 2'-deoxy-2'-fluorocytidine-3'-phosphate
  modified_base 11: mod_base = OTHER; note = 2'-deoxy-2'-fluorocytidine-3'-phosphate
  modified_base 12: mod_base = OTHER; note = 2'-O-methylguanosine-3'-phosphate
  modified_base 13: mod_base = OTHER; note = 2'-O-methyladenosine-3'-phosphate
  modified_base 14: mod_base = OTHER; note = 2'-O-methylguanosine-3'-phosphate
  modified_base 15: mod_base = OTHER; note = 2'-O-methylcytidine-3'-phosphate
  modified_base 16: mod_base = OTHER; note = 2'-O-methyladenosine-3'-phosphate
  modified_base 17: mod_base = OTHER; note = 2'-O-methyluridine-3'-phosphate
  modified_base 18: mod_base = OTHER; note = 2'-O-methylcytidine-3'-phosphate
  modified_base 19: mod_base = OTHER; note = 2'-O-methylcytidine-3'-phosphate
  modified_base 20: mod_base = OTHER; note = 2'-O-methylguanosine-3'-phosphate
  modified_base 21: mod_base = OTHER; note = 2'-O-methyluridine-3'-phosphate ((2S,4R)-1-[29-[[2-(acetylamino)-2-deoxy-beta-D-galactopyra nosyl]oxy]-14,14-bis[[3-[[3-[[5-[[2-(acetylamino)-2-deoxy-b eta-D-galactopyranosyl]oxy]-1-oxopentyl]amino]propyl]amino] -3-oxopropoxy]methyl]-1,12,19,25-tetraoxo-16-oxa-13,20,24-t riazanonacos-1-yl]-4-hydroxy-2-pyrrolidinyl)methyl ester
cgcatttctccgagcatccgt

SEQ ID NO: 312 - RNA, 21 nt, synthetic construct
  source 1..21: mol_type = other RNA
  modified_base 1: mod_base = OTHER; note = 2'-O-methyluridine-3'-phosphorothioate
  modified_base 2: mod_base = OTHER; note = 2'-O-methyluridine-3'-phosphorothioate
  modified_base 3: mod_base = OTHER; note = 2'-O-methylcytidine-3'-phosphate
  modified_base 4: mod_base = OTHER; note = 2'-O-methyluridine-3'-phosphate
  modified_base 5: mod_base = OTHER; note = 2'-O-methylcytidine-3'-phosphate
  modified_base 6: mod_base = OTHER; note = 2'-O-methylcytidine-3'-phosphate
  modified_base 7: mod_base = OTHER; note = 2'-deoxy-2'-fluoroguanosine-3'-phosphate
  modified_base 8: mod_base = OTHER; note = 2'-O-methyladenosine-3'-phosphate
  modified_base 9: mod_base = OTHER; note = 2'-deoxy-2'-fluoroguanosine-3'-phosphate
  modified_base 10: mod_base = OTHER; note = 2'-deoxy-2'-fluorocytidine-3'-phosphate
  modified_base 11: mod_base = OTHER; note = 2'-deoxy-2'-fluoroadenosine-3'-phosphate
  modified_base 12: mod_base = OTHER; note = 2'-O-methyluridine-3'-phosphate
  modified_base 13: mod_base = OTHER; note = 2'-O-methylcytidine-3'-phosphate
  modified_base 14: mod_base = OTHER; note = 2'-O-methylcytidine-3'-phosphate
  modified_base 15: mod_base = OTHER; note = 2'-O-methylguanosine-3'-phosphate
  modified_base 16: mod_base = OTHER; note = 2'-O-methyluridine-3'-phosphate
  modified_base 17: mod_base = OTHER; note = 2'-O-methylcytidine-3'-phosphate
  modified_base 18: mod_base = OTHER; note = 2'-O-methyluridine-3'-phosphate
  modified_base 19: mod_base = OTHER; note = 2'-O-methyladenosine-3'-phosphate
  modified_base 20: mod_base = OTHER; note = 2'-O-methyluridine-3'-phosphate
  modified_base 21: mod_base = OTHER; note = 2'-O-methyluridine-3'-phosphate ((2S,4R)-1-[29-[[2-(acetylamino)-2-deoxy-beta-D-galactopyra nosyl]oxy]-14,14-bis[[3-[[3-[[5-[[2-(acetylamino)-2-deoxy-b eta-D-galactopyranosyl]oxy]-1-oxopentyl]amino]propyl]amino] -3-oxopropoxy]methyl]-1,12,19,25-tetraoxo-16-oxa-13,20,24-t riazanonacos-1-yl]-4-hydroxy-2-pyrrolidinyl)methyl ester
ttctccgagcatccgtctatt

SEQ ID NO: 313 - RNA, 21 nt, synthetic construct
  source 1..21: mol_type = other RNA
  modified_base 1: mod_base = OTHER; note = 2'-O-methylguanosine-3'-phosphorothioate
  modified_base 2: mod_base = OTHER; note = 2'-O-methyladenosine-3'-phosphorothioate
  modified_base 3: mod_base = OTHER; note = 2'-O-methylguanosine-3'-phosphate
  modified_base 4: mod_base = OTHER; note = 2'-O-methylcytidine-3'-phosphate
  modified_base 5: mod_base = OTHER; note = 2'-O-methyladenosine-3'-phosphate
  modified_base 6: mod_base = OTHER; note = 2'-O-methyluridine-3'-phosphate
  modified_base 7: mod_base = OTHER; note = 2'-deoxy-2'-fluorocytidine-3'-phosphate
  modified_base 8: mod_base = OTHER; note = 2'-O-methylcytidine-3'-phosphate
  modified_base 9: mod_base = OTHER; note = 2'-deoxy-2'-fluoroguanosine-3'-phosphate
  modified_base 10: mod_base = OTHER; note = 2'-deoxy-2'-fluorouridine-3'-phosphate
  modified_base 11: mod_base = OTHER; note = 2'-deoxy-2'-fluorocytidine-3'-phosphate
  modified_base 12: mod_base = OTHER; note = 2'-O-methyluridine-3'-phosphate
  modified_base 13: mod_base = OTHER; note = 2'-O-methyladenosine-3'-phosphate
  modified_base 14: mod_base = OTHER; note = 2'-O-methyluridine-3'-phosphate
  modified_base 15: mod_base = OTHER; note = 2'-O-methylguanosine-3'-phosphate
  modified_base 16: mod_base = OTHER; note = 2'-O-methylguanosine-3'-phosphate
  modified_base 17: mod_base = OTHER; note = 2'-O-methylguanosine-3'-phosphate
  modified_base 18: mod_base = OTHER; note = 2'-O-methylcytidine-3'-phosphate
  modified_base 19: mod_base = OTHER; note = 2'-O-methyladenosine-3'-phosphate
  modified_base 20: mod_base = OTHER; note = 2'-O-methylguanosine-3'-phosphate
  modified_base 21: mod_base = OTHER; note = 2'-O-methyluridine-3'-phosphate ((2S,4R)-1-[29-[[2-(acetylamino)-2-deoxy-beta-D-galactopyra nosyl]oxy]-14,14-bis[[3-[[3-[[5-[[2-(acetylamino)-2-deoxy-b eta-D-galactopyranosyl]oxy]-1-oxopentyl]amino]propyl]amino] -3-oxopropoxy]methyl]-1,12,19,25-tetraoxo-16-oxa-13,20,24-t riazanonacos-1-yl]-4-hydroxy-2-pyrrolidinyl)methyl ester
gagcatccgtctatgggcagt

SEQ ID NO: 314 - RNA, 21 nt, synthetic construct
  source 1..21: mol_type = other RNA
  modified_base 1: mod_base = OTHER; note = 2'-O-methyluridine-3'-phosphorothioate
  modified_base 2: mod_base = OTHER; note = 2'-O-methylcytidine-3'-phosphorothioate
  modified_base 3: mod_base = OTHER; note = 2'-O-methylcytidine-3'-phosphate
  modified_base 4: mod_base = OTHER; note = 2'-O-methylguanosine-3'-phosphate
  modified_base 5: mod_base = OTHER; note = 2'-O-methyluridine-3'-phosphate
  modified_base 6: mod_base = OTHER; note = 2'-O-methylcytidine-3'-phosphate
  modified_base 7: mod_base = OTHER; note = 2'-deoxy-2'-fluorouridine-3'-phosphate
  modified_base 8: mod_base = OTHER; note = 2'-O-methyladenosine-3'-phosphate
  modified_base 9: mod_base = OTHER; note = 2'-deoxy-2'-fluorouridine-3'-phosphate
  modified_base 10: mod_base = OTHER; note = 2'-deoxy-2'-fluoroguanosine-3'-phosphate
  modified_base 11: mod_base = OTHER; note = 2'-deoxy-2'-fluoroguanosine-3'-phosphate
  modified_base 12: mod_base = OTHER; note = 2'-O-methylguanosine-3'-phosphate
  modified_base 13: mod_base = OTHER; note = 2'-O-methylcytidine-3'-phosphate
  modified_base 14: mod_base = OTHER; note = 2'-O-methyladenosine-3'-phosphate
  modified_base 15: mod_base = OTHER; note = 2'-O-methylguanosine-3'-phosphate
  modified_base 16: mod_base = OTHER; note = 2'-O-methyluridine-3'-phosphate
  modified_base 17: mod_base = OTHER; note = 2'-O-methyluridine-3'-phosphate
  modified_base 18: mod_base = OTHER; note = 2'-O-methyluridine-3'-phosphate
  modified_base 19: mod_base = OTHER; note = 2'-O-methylguanosine-3'-phosphate
  modified_base 20: mod_base = OTHER; note = 2'-O-methyluridine-3'-phosphate
  modified_base 21: mod_base = OTHER; note = 2'-O-methyluridine-3'-phosphate ((2S,4R)-1-[29-[[2-(acetylamino)-2-deoxy-beta-D-galactopyra nosyl]oxy]-14,14-bis[[3-[[3-[[5-[[2-(acetylamino)-2-deoxy-b eta-D-galactopyranosyl]oxy]-1-oxopentyl]amino]propyl]amino] -3-oxopropoxy]methyl]-1,12,19,25-tetraoxo-16-oxa-13,20,24-t riazanonacos-1-yl]-4-hydroxy-2-pyrrolidinyl)methyl ester
tccgtctatgggcagtttgtt

SEQ ID NO: 315 - RNA, 21 nt, synthetic construct
  source 1..21: mol_type = other RNA
  modified_base 1: mod_base = OTHER; note = 2'-O-methyluridine-3'-phosphorothioate
  modified_base 2: mod_base = OTHER; note = 2'-O-methyladenosine-3'-phosphorothioate
  modified_base 3: mod_base = OTHER; note = 2'-O-methyluridine-3'-phosphate
  modified_base 4: mod_base = OTHER; note = 2'-O-methylguanosine-3'-phosphate
  modified_base 5: mod_base = OTHER; note = 2'-O-methylguanosine-3'-phosphate
  modified_base 6: mod_base = OTHER; note = 2'-O-methylguanosine-3'-phosphate
  modified_base 7: mod_base = OTHER; note = 2'-deoxy-2'-fluorocytidine-3'-phosphate
  modified_base 8: mod_base = OTHER; note = 2'-O-methyladenosine-3'-phosphate
  modified_base 9: mod_base = OTHER; note = 2'-deoxy-2'-fluoroguanosine-3'-phosphate
  modified_base 10: mod_base = OTHER; note = 2'-deoxy-2'-fluorouridine-3'-phosphate
  modified_base 11: mod_base = OTHER; note = 2'-deoxy-2'-fluorouridine-3'-phosphate
  modified_base 12: mod_base = OTHER; note = 2'-O-methyluridine-3'-phosphate
  modified_base 13: mod_base = OTHER; note = 2'-O-methylguanosine-3'-phosphate
  modified_base 14: mod_base = OTHER; note = 2'-O-methyluridine-3'-phosphate
  modified_base 15: mod_base = OTHER; note = 2'-O-methylguanosine-3'-phosphate
  modified_base 16: mod_base = OTHER; note = 2'-O-methylguanosine-3'-phosphate
  modified_base 17: mod_base = OTHER; note = 2'-O-methylcytidine-3'-phosphate
  modified_base 18: mod_base = OTHER; note = 2'-O-methyluridine-3'-phosphate
  modified_base 19: mod_base = OTHER; note = 2'-O-methylguanosine-3'-phosphate
  modified_base 20: mod_base = OTHER; note = 2'-O-methylguanosine-3'-phosphate
  modified_base 21: mod_base = OTHER; note = 2'-O-methyluridine-3'-phosphate ((2S,4R)-1-[29-[[2-(acetylamino)-2-deoxy-beta-D-galactopyra nosyl]oxy]-14,14-bis[[3-[[3-[[5-[[2-(acetylamino)-2-deoxy-b eta-D-galactopyranosyl]oxy]-1-oxopentyl]amino]propyl]amino] -3-oxopropoxy]methyl]-1,12,19,25-tetraoxo-16-oxa-13,20,24-t riazanonacos-1-yl]-4-hydroxy-2-pyrrolidinyl)methyl ester
tatgggcagtttgtggctggt

SEQ ID NO: 316 - RNA, 21 nt, synthetic construct
  source 1..21: mol_type = other RNA
  modified_base 1: mod_base = OTHER; note = 2'-O-methylcytidine-3'-phosphorothioate
  modified_base 2: mod_base = OTHER; note = 2'-O-methyladenosine-3'-phosphorothioate
  modified_base 3: mod_base = OTHER; note = 2'-O-methylguanosine-3'-phosphate
  modified_base 4: mod_base = OTHER; note = 2'-O-methyluridine-3'-phosphate
  modified_base 5: mod_base = OTHER; note = 2'-O-methyluridine-3'-phosphate
  modified_base 6: mod_base = OTHER; note = 2'-O-methyluridine-3'-phosphate
  modified_base 7: mod_base = OTHER; note = 2'-deoxy-2'-fluoroguanosine-3'-phosphate
  modified_base 8: mod_base = OTHER; note = 2'-O-methyluridine-3'-phosphate
  modified_base 9: mod_base = OTHER; note = 2'-deoxy-2'-fluoroguanosine-3'-phosphate
  modified_base 10: mod_base = OTHER; note = 2'-deoxy-2'-fluoroguanosine-3'-phosphate
  modified_base 11: mod_base = OTHER; note = 2'-deoxy-2'-fluorocytidine-3'-phosphate
  modified_base 12: mod_base = OTHER; note = 2'-O-methyluridine-3'-phosphate
  modified_base 13: mod_base = OTHER; note = 2'-O-methylguanosine-3'-phosphate
  modified_base 14: mod_base = OTHER; note = 2'-O-methylguanosine-3'-phosphate
  modified_base 15: mod_base = OTHER; note = 2'-O-methyluridine-3'-phosphate
  modified_base 16: mod_base = OTHER; note = 2'-O-methylguanosine-3'-phosphate
  modified_base 17: mod_base = OTHER; note = 2'-O-methyladenosine-3'-phosphate
  modified_base 18: mod_base = OTHER; note = 2'-O-methylguanosine-3'-phosphate
  modified_base 19: mod_base = OTHER; note = 2'-O-methyladenosine-3'-phosphate
  modified_base 20: mod_base = OTHER; note = 2'-O-methylcytidine-3'-phosphate
  modified_base 21: mod_base = OTHER; note = 2'-O-methyluridine-3'-phosphate ((2S,4R)-1-[29-[[2-(acetylamino)-2-deoxy-beta-D-galactopyra nosyl]oxy]-14,14-bis[[3-[[3-[[5-[[2-(acetylamino)-2-deoxy-b eta-D-galactopyranosyl]oxy]-1-oxopentyl]amino]propyl]amino] -3-oxopropoxy]methyl]-1,12,19,25-tetraoxo-16-oxa-13,20,24-t riazanonacos-1-yl]-4-hydroxy-2-pyrrolidinyl)methyl ester
cagtttgtggctggtgagact

SEQ ID NO: 317 - RNA, 21 nt, synthetic construct
  source 1..21: mol_type = other RNA
  modified_base 1: mod_base = OTHER; note = 2'-O-methyluridine-3'-phosphorothioate
  modified_base 2: mod_base = OTHER; note = 2'-O-methylguanosine-3'-phosphorothioate
  modified_base 3: mod_base = OTHER; note = 2'-O-methylguanosine-3'-phosphate
  modified_base 4: mod_base = OTHER; note = 2'-O-methylcytidine-3'-phosphate
  modified_base 5: mod_base = OTHER; note = 2'-O-methyluridine-3'-phosphate
  modified_base 6: mod_base = OTHER; note = 2'-O-methylguanosine-3'-phosphate
  modified_base 7: mod_base = OTHER; note = 2'-deoxy-2'-fluoroguanosine-3'-phosphate
  modified_base 8: mod_base = OTHER; note = 2'-O-methyluridine-3'-phosphate
  modified_base 9: mod_base = OTHER; note = 2'-deoxy-2'-fluoroguanosine-3'-phosphate
  modified_base 10: mod_base = OTHER; note = 2'-deoxy-2'-fluoroadenosine-3'-phosphate
  modified_base 11: mod_base = OTHER; note = 2'-deoxy-2'-fluoroguanosine-3'-phosphate
  modified_base 12: mod_base = OTHER; note = 2'-O-methyladenosine-3'-phosphate
  modified_base 13: mod_base = OTHER; note = 2'-O-methylcytidine-3'-phosphate
  modified_base 14: mod_base = OTHER; note = 2'-O-methyladenosine-3'-phosphate
  modified_base 15: mod_base = OTHER; note = 2'-O-methylguanosine-3'-phosphate
  modified_base 16: mod_base = OTHER; note = 2'-O-methylcytidine-3'-phosphate
  modified_base 17: mod_base = OTHER; note = 2'-O-methyladenosine-3'-phosphate
  modified_base 18: mod_base = OTHER; note = 2'-O-methylguanosine-3'-phosphate
  modified_base 19: mod_base = OTHER; note = 2'-O-methyladenosine-3'-phosphate
  modified_base 20: mod_base = OTHER; note = 2'-O-methylguanosine-3'-phosphate
  modified_base 21: mod_base = OTHER; note = 2'-O-methyluridine-3'-phosphate ((2S,4R)-1-[29-[[2-(acetylamino)-2-deoxy-beta-D-galactopyra nosyl]oxy]-14,14-bis[[3-[[3-[[5-[[2-(acetylamino)-2-deoxy-b eta-D-galactopyranosyl]oxy]-1-oxopentyl]amino]propyl]amino] -3-oxopropoxy]methyl]-1,12,19,25-tetraoxo-16-oxa-13,20,24-t riazanonacos-1-yl]-4-hydroxy-2-pyrrolidinyl)methyl ester
tggctggtgagacagcagagt

SEQ ID NO: 318 - RNA, 21 nt, synthetic construct
  source 1..21: mol_type = other RNA
  modified_base 1: mod_base = OTHER; note = 2'-O-methylguanosine-3'-phosphorothioate
  modified_base 2: mod_base = OTHER; note = 2'-O-methyluridine-3'-phosphorothioate
  modified_base 3: mod_base = OTHER; note = 2'-O-methylguanosine-3'-phosphate
  modified_base 4: mod_base = OTHER; note = 2'-O-methyladenosine-3'-phosphate
  modified_base 5: mod_base = OTHER; note = 2'-O-methylguanosine-3'-phosphate
  modified_base 6: mod_base = OTHER; note = 2'-O-methyladenosine-3'-phosphate
  modified_base 7: mod_base = OTHER; note = 2'-deoxy-2'-fluorocytidine-3'-phosphate
  modified_base 8: mod_base = OTHER; note = 2'-O-methyladenosine-3'-phosphate
  modified_base 9: mod_base = OTHER; note = 2'-deoxy-2'-fluoroguanosine-3'-phosphate
  modified_base 10: mod_base = OTHER; note = 2'-deoxy-2'-fluorocytidine-3'-phosphate
  modified_base 11: mod_base = OTHER; note = 2'-deoxy-2'-fluoroadenosine-3'-phosphate
  modified_base 12: mod_base = OTHER; note = 2'-O-methylguanosine-3'-phosphate
  modified_base 13: mod_base = OTHER; note = 2'-O-methyladenosine-3'-phosphate
  modified_base 14: mod_base = OTHER; note = 2'-O-methylguanosine-3'-phosphate
  modified_base 15: mod_base = OTHER; note = 2'-O-methylguanosine-3'-phosphate
  modified_base 16: mod_base = OTHER; note = 2'-O-methyladenosine-3'-phosphate
  modified_base 17: mod_base = OTHER; note = 2'-O-methylguanosine-3'-phosphate
  modified_base 18: mod_base = OTHER; note = 2'-O-methylguanosine-3'-phosphate
  modified_base 19: mod_base = OTHER; note = 2'-O-methyluridine-3'-phosphate
  modified_base 20: mod_base = OTHER; note = 2'-O-methylguanosine-3'-phosphate
  modified_base 21: mod_base = OTHER; note = 2'-O-methyluridine-3'-phosphate ((2S,4R)-1-[29-[[2-(acetylamino)-2-deoxy-beta-D-galactopyra nosyl]oxy]-14,14-bis[[3-[[3-[[5-[[2-(acetylamino)-2-deoxy-b eta-D-galactopyranosyl]oxy]-1-oxopentyl]amino]propyl]amino] -3-oxopropoxy]methyl]-1,12,19,25-tetraoxo-16-oxa-13,20,24-t riazanonacos-1-yl]-4-hydroxy-2-pyrrolidinyl)methyl ester
gtgagacagcagaggaggtgt

SEQ ID NO: 319 - RNA, 21 nt, synthetic construct
  source 1..21: mol_type = other RNA
  modified_base 1: mod_base = OTHER; note = 2'-O-methyladenosine-3'-phosphorothioate
  modified_base 2: mod_base = OTHER; note = 2'-O-methylguanosine-3'-phosphorothioate
  modified_base 3: mod_base = OTHER; note = 2'-O-methylcytidine-3'-phosphate
  modified_base 4: mod_base = OTHER; note = 2'-O-methyladenosine-3'-phosphate
  modified_base 5: mod_base = OTHER; note = 2'-O-methylguanosine-3'-phosphate
  modified_base 6: mod_base = OTHER; note = 2'-O-methyladenosine-3'-phosphate
  modified_base 7: mod_base = OTHER; note = 2'-deoxy-2'-fluoroguanosine-3'-phosphate
  modified_base 8: mod_base = OTHER; note = 2'-O-methylguanosine-3'-phosphate
  modified_base 9: mod_base = OTHER; note = 2'-deoxy-2'-fluoroadenosine-3'-phosphate
  modified_base 10: mod_base = OTHER; note = 2'-deoxy-2'-fluoroguanosine-3'-phosphate
  modified_base 11: mod_base = OTHER; note = 2'-deoxy-2'-fluoroguanosine-3'-phosphate
  modified_base 12: mod_base = OTHER; note = 2'-O-methyluridine-3'-phosphate
  modified_base 13: mod_base = OTHER; note = 2'-O-methylguanosine-3'-phosphate
  modified_base 14: mod_base = OTHER; note = 2'-O-methyladenosine-3'-phosphate
  modified_base 15: mod_base = OTHER; note = 2'-O-methyladenosine-3'-phosphate
  modified_base 16: mod_base = OTHER; note = 2'-O-methylguanosine-3'-phosphate
  modified_base 17: mod_base = OTHER; note = 2'-O-methylguanosine-3'-phosphate
  modified_base 18: mod_base = OTHER; note = 2'-O-methylguanosine-3'-phosphate
  modified_base 19: mod_base = OTHER; note = 2'-O-methylcytidine-3'-phosphate
  modified_base 20: mod_base = OTHER; note = 2'-O-methyluridine-3'-phosphate
  modified_base 21: mod_base = OTHER; note = 2'-O-methyluridine-3'-phosphate ((2S,4R)-1-[29-[[2-(acetylamino)-2-deoxy-beta-D-galactopyra nosyl]oxy]-14,14-bis[[3-[[3-[[5-[[2-(acetylamino)-2-deoxy-b eta-D-galactopyranosyl]oxy]-1-oxopentyl]amino]propyl]amino] -3-oxopropoxy]methyl]-1,12,19,25-tetraoxo-16-oxa-13,20,24-t riazanonacos-1-yl]-4-hydroxy-2-pyrrolidinyl)methyl ester
agcagaggaggtgaagggctt

SEQ ID NO: 320 - RNA, 21 nt, synthetic construct
  source 1..21: mol_type = other RNA
  modified_base 1: mod_base = OTHER; note = 2'-O-methylguanosine-3'-phosphorothioate
  modified_base 2: mod_base = OTHER; note = 2'-O-methyladenosine-3'-phosphorothioate
  modified_base 3: mod_base = OTHER; note = 2'-O-methylguanosine-3'-phosphate
  modified_base 4: mod_base = OTHER; note = 2'-O-methylguanosine-3'-phosphate
  modified_base 5: mod_base = OTHER; note = 2'-O-methyluridine-3'-phosphate
  modified_base 6: mod_base = OTHER; note = 2'-O-methylguanosine-3'-phosphate
  modified_base 7: mod_base = OTHER; note = 2'-deoxy-2'-fluoroadenosine-3'-phosphate
  modified_base 8: mod_base = OTHER; note = 2'-O-methyladenosine-3'-phosphate
  modified_base 9: mod_base = OTHER; note = 2'-deoxy-2'-fluoroguanosine-3'-phosphate
  modified_base 10: mod_base = OTHER; note = 2'-deoxy-2'-fluoroguanosine-3'-phosphate
  modified_base 11: mod_base = OTHER; note = 2'-deoxy-2'-fluoroguanosine-3'-phosphate
  modified_base 12: mod_base = OTHER; note = 2'-O-methylcytidine-3'-phosphate
  modified_base 13: mod_base = OTHER; note = 2'-O-methyluridine-3'-phosphate
  modified_base 14: mod_base = OTHER; note = 2'-O-methylguanosine-3'-phosphate
  modified_base 15: mod_base = OTHER; note = 2'-O-methylcytidine-3'-phosphate
  modified_base 16: mod_base = OTHER; note = 2'-O-methylguanosine-3'-phosphate
  modified_base 17: mod_base = OTHER; note = 2'-O-methyluridine-3'-phosphate
  modified_base 18: mod_base = OTHER; note = 2'-O-methylguanosine-3'-phosphate
  modified_base 19: mod_base = OTHER; note = 2'-O-methylcytidine-3'-phosphate
  modified_base 20: mod_base = OTHER; note = 2'-O-methyladenosine-3'-phosphate
  modified_base 21: mod_base = OTHER; note = 2'-O-methyluridine-3'-phosphate ((2S,4R)-1-[29-[[2-(acetylamino)-2-deoxy-beta-D-galactopyra nosyl]oxy]-14,14-bis[[3-[[3-[[5-[[2-(acetylamino)-2-deoxy-b eta-D-galactopyranosyl]oxy]-1-oxopentyl]amino]propyl]amino] -3-oxopropoxy]methyl]-1,12,19,25-tetraoxo-16-oxa-13,20,24-t riazanonacos-1-yl]-4-hydroxy-2-pyrrolidinyl)methyl ester
gaggtgaagggctgcgtgcat

SEQ ID NO: 321 - RNA, 21 nt, synthetic construct
  source 1..21: mol_type = other RNA
  modified_base 1: mod_base = OTHER; note = 2'-O-methyladenosine-3'-phosphorothioate
  modified_base 2: mod_base = OTHER; note = 2'-O-methyladenosine-3'-phosphorothioate
  modified_base 3: mod_base = OTHER; note = 2'-O-methylguanosine-3'-phosphate
  modified_base 4: mod_base = OTHER; note = 2'-O-methylguanosine-3'-phosphate
  modified_base 5: mod_base = OTHER; note = 2'-O-methylguanosine-3'-phosphate
  modified_base 6: mod_base = OTHER; note = 2'-O-methylcytidine-3'-phosphate
  modified_base 7: mod_base = OTHER; note = 2'-deoxy-2'-fluorouridine-3'-phosphate
  modified_base 8: mod_base = OTHER; note = 2'-O-methylguanosine-3'-phosphate
  modified_base 9: mod_base = OTHER; note = 2'-deoxy-2'-fluorocytidine-3'-phosphate
  modified_base 10: mod_base = OTHER; note = 2'-deoxy-2'-fluoroguanosine-3'-phosphate
  modified_base 11: mod_base = OTHER; note = 2'-deoxy-2'-fluorouridine-3'-phosphate
  modified_base 12: mod_base = OTHER; note = 2'-O-methylguanosine-3'-phosphate
  modified_base 13: mod_base = OTHER; note = 2'-O-methylcytidine-3'-phosphate
  modified_base 14: mod_base = OTHER; note = 2'-O-methyladenosine-3'-phosphate
  modified_base 15: mod_base = OTHER; note = 2'-O-methylguanosine-3'-phosphate
  modified_base 16: mod_base = OTHER; note = 2'-O-methylcytidine-3'-phosphate
  modified_base 17: mod_base = OTHER; note = 2'-O-methyladenosine-3'-phosphate
  modified_base 18: mod_base = OTHER; note = 2'-O-methylguanosine-3'-phosphate
  modified_base 19: mod_base = OTHER; note = 2'-O-methylcytidine-3'-phosphate
  modified_base 20: mod_base = OTHER; note = 2'-O-methyluridine-3'-phosphate
  modified_base 21: mod_base = OTHER; note = 2'-O-methyluridine-3'-phosphate ((2S,4R)-1-[29-[[2-(acetylamino)-2-deoxy-beta-D-galactopyra nosyl]oxy]-14,14-bis[[3-[[3-[[5-[[2-(acetylamino)-2-deoxy-b eta-D-galactopyranosyl]oxy]-1-oxopentyl]amino]propyl]amino] -3-oxopropoxy]methyl]-1,12,19,25-tetraoxo-16-oxa-13,20,24-t riazanonacos-1-yl]-4-hydroxy-2-pyrrolidinyl)methyl ester
aagggctgcgtgcagcagctt

SEQ ID NO: 322 - RNA, 21 nt, synthetic construct
  source 1..21: mol_type = other RNA
  modified_base 1: mod_base = OTHER; note = 2'-O-methyluridine-3'-phosphorothioate
  modified_base 2: mod_base = OTHER; note = 2'-O-methylguanosine-3'-phosphorothioate
  modified_base 3: mod_base = OTHER; note = 2'-O-methylcytidine-3'-phosphate
  modified_base 4: mod_base = OTHER; note = 2'-O-methyluridine-3'-phosphate
  modified_base 5: mod_base = OTHER; note = 2'-O-methylguanosine-3'-phosphate
  modified_base 6: mod_base = OTHER; note = 2'-O-methylguanosine-3'-phosphate
  modified_base 7: mod_base = OTHER; note = 2'-deoxy-2'-fluorocytidine-3'-phosphate
  modified_base 8: mod_base = OTHER; note = 2'-O-methyladenosine-3'-phosphate
  modified_base 9: mod_base = OTHER; note = 2'-deoxy-2'-fluoroguanosine-3'-phosphate
  modified_base 10: mod_base = OTHER; note = 2'-deoxy-2'-fluorouridine-3'-phosphate
  modified_base 11: mod_base = OTHER; note = 2'-deoxy-2'-fluoroguanosine-3'-phosphate
  modified_base 12: mod_base = OTHER; note = 2'-O-methylcytidine-3'-phosphate
  modified_base 13: mod_base = OTHER; note = 2'-O-methylcytidine-3'-phosphate
  modified_base 14: mod_base = OTHER; note = 2'-O-methylcytidine-3'-phosphate
  modified_base 15: mod_base = OTHER; note = 2'-O-methyladenosine-3'-phosphate
  modified_base 16: mod_base = OTHER; note = 2'-O-methylcytidine-3'-phosphate
  modified_base 17: mod_base = OTHER; note = 2'-O-methyluridine-3'-phosphate
  modified_base 18: mod_base = OTHER; note = 2'-O-methylguanosine-3'-phosphate
  modified_base 19: mod_base = OTHER; note = 2'-O-methyladenosine-3'-phosphate
  modified_base 20: mod_base = OTHER; note = 2'-O-methylguanosine-3'-phosphate
  modified_base 21: mod_base = OTHER; note = 2'-O-methyluridine-3'-phosphate ((2S,4R)-1-[29-[[2-(acetylamino)-2-deoxy-beta-D-galactopyra nosyl]oxy]-14,14-bis[[3-[[3-[[5-[[2-(acetylamino)-2-deoxy-b eta-D-galactopyranosyl]oxy]-1-oxopentyl]amino]propyl]amino] -3-oxopropoxy]methyl]-1,12,19,25-tetraoxo-16-oxa-13,20,24-t riazanonacos-1-yl]-4-hydroxy-2-pyrrolidinyl)methyl ester
tgctggcagtgcccactgagt

SEQ ID NO: 323 - RNA, 21 nt, synthetic construct
  source 1..21: mol_type = other RNA
  modified_base 1: mod_base = OTHER; note = 2'-O-methylguanosine-3'-phosphorothioate
  modified_base 2: mod_base = OTHER; note = 2'-O-methylcytidine-3'-phosphorothioate
  modified_base 3: mod_base = OTHER; note = 2'-O-methyladenosine-3'-phosphate
  modified_base 4: mod_base = OTHER; note = 2'-O-methylguanosine-3'-phosphate
  modified_base 5: mod_base = OTHER; note = 2'-O-methyluridine-3'-phosphate
  modified_base 6: mod_base = OTHER; note = 2'-O-methylguanosine-3'-phosphate
  modified_base 7: mod_base = OTHER; note = 2'-deoxy-2'-fluorocytidine-3'-phosphate
  modified_base 8: mod_base = OTHER; note = 2'-O-methylcytidine-3'-phosphate
  modified_base 9: mod_base = OTHER; note = 2'-deoxy-2'-fluorocytidine-3'-phosphate
  modified_base 10: mod_base = OTHER; note = 2'-deoxy-2'-fluoroadenosine-3'-phosphate
  modified_base 11: mod_base = OTHER; note = 2'-deoxy-2'-fluorocytidine-3'-phosphate
  modified_base 12: mod_base = OTHER; note = 2'-O-methyluridine-3'-phosphate
  modified_base 13: mod_base = OTHER; note = 2'-O-methylguanosine-3'-phosphate
  modified_base 14: mod_base = OTHER; note = 2'-O-methyladenosine-3'-phosphate
  modified_base 15: mod_base = OTHER; note = 2'-O-methylguanosine-3'-phosphate
  modified_base 16: mod_base = OTHER; note = 2'-O-methylguanosine-3'-phosphate
  modified_base 17: mod_base = OTHER; note = 2'-O-methyladenosine-3'-phosphate
  modified_base 18: mod_base = OTHER; note = 2'-O-methylguanosine-3'-phosphate
  modified_base 19: mod_base = OTHER; note = 2'-O-methylguanosine-3'-phosphate
  modified_base 20: mod_base = OTHER; note = 2'-O-methyladenosine-3'-phosphate
  modified_base 21: mod_base = OTHER; note = 2'-O-methyluridine-3'-phosphate ((2S,4R)-1-[29-[[2-(acetylamino)-2-deoxy-beta-D-galactopyra nosyl]oxy]-14,14-bis[[3-[[3-[[5-[[2-(acetylamino)-2-deoxy-b eta-D-galactopyranosyl]oxy]-1-oxopentyl]amino]propyl]amino] -3-oxopropoxy]methyl]-1,12,19,25-tetraoxo-16-oxa-13,20,24-t riazanonacos-1-yl]-4-hydroxy-2-pyrrolidinyl)methyl ester
gcagtgcccactgaggaggat

SEQ ID NO: 324 - RNA, 21 nt, synthetic construct
  source 1..21: mol_type = other RNA
  modified_base 1: mod_base = OTHER; note = 2'-O-methylcytidine-3'-phosphorothioate
  modified_base 2: mod_base = OTHER; note = 2'-O-methyluridine-3'-phosphorothioate
  modified_base 3: mod_base = OTHER; note = 2'-O-methylguanosine-3'-phosphate
  modified_base 4: mod_base = OTHER; note = 2'-O-methyladenosine-3'-phosphate
  modified_base 5: mod_base = OTHER; note = 2'-O-methylguanosine-3'-phosphate
  modified_base 6: mod_base = OTHER; note = 2'-O-methylguanosine-3'-phosphate
  modified_base 7: mod_base = OTHER; note = 2'-deoxy-2'-fluoroadenosine-3'-phosphate
  modified_base 8: mod_base = OTHER; note = 2'-O-methylguanosine-3'-phosphate
  modified_base 9: mod_base = OTHER; note = 2'-deoxy-2'-fluoroguanosine-3'-phosphate
  modified_base 10: mod_base = OTHER; note = 2'-deoxy-2'-fluoroadenosine-3'-phosphate
  modified_base 11: mod_base = OTHER; note = 2'-deoxy-2'-fluoroguanosine-3'-phosphate
  modified_base 12: mod_base = OTHER; note = 2'-O-methylcytidine-3'-phosphate
  modified_base 13: mod_base = OTHER; note = 2'-O-methylcytidine-3'-phosphate
  modified_base 14: mod_base = OTHER; note = 2'-O-methylguanosine-3'-phosphate
  modified_base 15: mod_base = OTHER; note = 2'-O-methylguanosine-3'-phosphate
  modified_base 16: mod_base = OTHER; note = 2'-O-methyladenosine-3'-phosphate
  modified_base 17: mod_base = OTHER; note = 2'-O-methylcytidine-3'-phosphate
  modified_base 18: mod_base = OTHER; note = 2'-O-methyluridine-3'-phosphate
  modified_base 19: mod_base = OTHER; note = 2'-O-methylcytidine-3'-phosphate
  modified_base 20: mod_base = OTHER; note = 2'-O-methyluridine-3'-phosphate
  modified_base 21: mod_base = OTHER; note = 2'-O-methyluridine-3'-phosphate ((2S,4R)-1-[29-[[2-(acetylamino)-2-deoxy-beta-D-galactopyra nosyl]oxy]-14,14-bis[[3-[[3-[[5-[[2-(acetylamino)-2-deoxy-b eta-D-galactopyranosyl]oxy]-1-oxopentyl]amino]propyl]amino] -3-oxopropoxy]methyl]-1,12,19,25-tetraoxo-16-oxa-13,20,24-t riazanonacos-1-yl]-4-hydroxy-2-pyrrolidinyl)methyl ester
ctgaggaggagccggactctt

SEQ ID NO: 325 - RNA, 21 nt, synthetic construct
  source 1..21: mol_type = other RNA
  modified_base 1: mod_base = OTHER; note = 2'-O-methylguanosine-3'-phosphorothioate
  modified_base 2: mod_base = OTHER; note = 2'-O-methyladenosine-3'-phosphorothioate
  modified_base 3: mod_base = OTHER; note = 2'-O-methylguanosine-3'-phosphate
  modified_base 4: mod_base = OTHER; note = 2'-O-methylcytidine-3'-phosphate
  modified_base 5: mod_base = OTHER; note = 2'-O-methylcytidine-3'-phosphate
  modified_base 6: mod_base = OTHER; note = 2'-O-methylguanosine-3'-phosphate
  modified_base 7: mod_base = OTHER; note = 2'-deoxy-2'-fluoroguanosine-3'-phosphate
  modified_base 8: mod_base = OTHER; note = 2'-O-methyladenosine-3'-phosphate
  modified_base 9: mod_base = OTHER; note = 2'-deoxy-2'-fluorocytidine-3'-phosphate
  modified_base 10: mod_base = OTHER; note = 2'-deoxy-2'-fluorouridine-3'-phosphate
  modified_base 11: mod_base = OTHER; note = 2'-deoxy-2'-fluorocytidine-3'-phosphate
  modified_base 12: mod_base = OTHER; note = 2'-O-methyluridine-3'-phosphate
  modified_base 13: mod_base = OTHER; note = 2'-O-methylguanosine-3'-phosphate
  modified_base 14: mod_base = OTHER; note = 2'-O-methylcytidine-3'-phosphate
  modified_base 15: mod_base = OTHER; note = 2'-O-methyluridine-3'-phosphate
  modified_base 16: mod_base = OTHER; note = 2'-O-methylguanosine-3'-phosphate
  modified_base 17: mod_base = OTHER; note = 2'-O-methylcytidine-3'-phosphate
  modified_base 18: mod_base = OTHER; note = 2'-O-methylcytidine-3'-phosphate
  modified_base 19: mod_base = OTHER; note = 2'-O-methyladenosine-3'-phosphate
  modified_base 20: mod_base = OTHER; note = 2'-O-methyladenosine-3'-phosphate
  modified_base 21: mod_base = OTHER; note = 2'-O-methyluridine-3'-phosphate ((2S,4R)-1-[29-[[2-(acetylamino)-2-deoxy-beta-D-galactopyra nosyl]oxy]-14,14-bis[[3-[[3-[[5-[[2-(acetylamino)-2-deoxy-b eta-D-galactopyranosyl]oxy]-1-oxopentyl]amino]propyl]amino] -3-oxopropoxy]methyl]-1,12,19,25-tetraoxo-16-oxa-13,20,24-t riazanonacos-1-yl]-4-hydroxy-2-pyrrolidinyl)methyl ester
gagccggactctgctgccaat

SEQ ID NO: 326 - RNA, 21 nt, synthetic construct
  source 1..21: mol_type = other RNA
  modified_base 1: mod_base = OTHER; note = 2'-O-methyladenosine-3'-phosphorothioate
  modified_base 2: mod_base = OTHER; note = 2'-O-methylcytidine-3'-phosphorothioate
  modified_base 3: mod_base = OTHER; note = 2'-O-methyluridine-3'-phosphate
  modified_base 4: mod_base = OTHER; note = 2'-O-methylcytidine-3'-phosphate
  modified_base 5: mod_base = OTHER; note = 2'-O-methyluridine-3'-phosphate
  modified_base 6: mod_base = OTHER; note = 2'-O-methylguanosine-3'-phosphate
  modified_base 7: mod_base = OTHER; note = 2'-deoxy-2'-fluorocytidine-3'-phosphate
  modified_base 8: mod_base = OTHER; note = 2'-O-methyluridine-3'-phosphate
  modified_base 9: mod_base = OTHER; note = 2'-deoxy-2'-fluoroguanosine-3'-phosphate
  modified_base 10: mod_base = OTHER; note = 2'-deoxy-2'-fluorocytidine-3'-phosphate
  modified_base 11: mod_base = OTHER; note = 2'-deoxy-2'-fluorocytidine-3'-phosphate
  modified_base 12: mod_base = OTHER; note = 2'-O-methyladenosine-3'-phosphate
  modified_base 13: mod_base = OTHER; note = 2'-O-methyladenosine-3'-phosphate
  modified_base 14: mod_base = OTHER; note = 2'-O-methylguanosine-3'-phosphate
  modified_base 15: mod_base = OTHER; note = 2'-O-methyladenosine-3'-phosphate
  modified_base 16: mod_base = OTHER; note = 2'-O-methylguanosine-3'-phosphate
  modified_base 17: mod_base = OTHER; note = 2'-O-methyluridine-3'-phosphate
  modified_base 18: mod_base = OTHER; note = 2'-O-methylguanosine-3'-phosphate
  modified_base 19: mod_base = OTHER; note = 2'-O-methylguanosine-3'-phosphate
  modified_base 20: mod_base = OTHER; note = 2'-O-methyluridine-3'-phosphate
  modified_base 21: mod_base = OTHER; note = 2'-O-methyluridine-3'-phosphate ((2S,4R)-1-[29-[[2-(acetylamino)-2-deoxy-beta-D-galactopyra nosyl]oxy]-14,14-bis[[3-[[3-[[5-[[2-(acetylamino)-2-deoxy-b eta-D-galactopyranosyl]oxy]-1-oxopentyl]amino]propyl]amino] -3-oxopropoxy]methyl]-1,12,19,25-tetraoxo-16-oxa-13,20,24-t riazanonacos-1-yl]-4-hydroxy-2-pyrrolidinyl)methyl ester
actctgctgccaagagtggtt

SEQ ID NO: 327 - RNA, 21 nt, synthetic construct
  source 1..21: mol_type = other RNA
  modified_base 1: mod_base = OTHER; note = 2'-O-methylguanosine-3'-phosphorothioate
  modified_base 2: mod_base = OTHER; note = 2'-O-methylcytidine-3'-phosphorothioate
  modified_base 3: mod_base = OTHER; note = 2'-O-methyluridine-3'-phosphate
  modified_base 4: mod_base = OTHER; note = 2'-O-methylguanosine-3'-phosphate
  modified_base 5: mod_base = OTHER; note = 2'-O-methylcytidine-3'-phosphate
  modified_base 6: mod_base = OTHER; note = 2'-O-methylcytidine-3'-phosphate
  modified_base 7: mod_base = OTHER; note = 2'-deoxy-2'-fluoroadenosine-3'-phosphate
  modified_base 8: mod_base = OTHER; note = 2'-O-methyladenosine-3'-phosphate
  modified_base 9: mod_base = OTHER; note = 2'-deoxy-2'-fluoroguanosine-3'-phosphate
  modified_base 10: mod_base = OTHER; note = 2'-deoxy-2'-fluoroadenosine-3'-phosphate
  modified_base 11: mod_base = OTHER; note = 2'-deoxy-2'-fluoroguanosine-3'-phosphate
  modified_base 12: mod_base = OTHER; note = 2'-O-methyluridine-3'-phosphate
  modified_base 13: mod_base = OTHER; note = 2'-O-methylguanosine-3'-phosphate
  modified_base 14: mod_base = OTHER; note = 2'-O-methylguanosine-3'-phosphate
  modified_base 15: mod_base = OTHER; note = 2'-O-methyluridine-3'-phosphate
  modified_base 16: mod_base = OTHER; note = 2'-O-methylguanosine-3'-phosphate
  modified_base 17: mod_base = OTHER; note = 2'-O-methyladenosine-3'-phosphate
  modified_base 18: mod_base = OTHER; note = 2'-O-methylguanosine-3'-phosphate
  modified_base 19: mod_base = OTHER; note = 2'-O-methylguanosine-3'-phosphate
  modified_base 20: mod_base = OTHER; note = 2'-O-methylcytidine-3'-phosphate
  modified_base 21: mod_base = OTHER; note = 2'-O-methyluridine-3'-phosphate ((2S,4R)-1-[29-[[2-(acetylamino)-2-deoxy-beta-D-galactopyra nosyl]oxy]-14,14-bis[[3-[[3-[[5-[[2-(acetylamino)-2-deoxy-b eta-D-galactopyranosyl]oxy]-1-oxopentyl]amino]propyl]amino] -3-oxopropoxy]methyl]-1,12,19,25-tetraoxo-16-oxa-13,20,24-t riazanonacos-1-yl]-4-hydroxy-2-pyrrolidinyl)methyl ester
gctgccaagagtggtgaggct

SEQ ID NO: 328 - RNA, 21 nt, synthetic construct
  source 1..21: mol_type = other RNA
  modified_base 1: mod_base = OTHER; note = 2'-O-methyladenosine-3'-phosphorothioate
  modified_base 2: mod_base = OTHER; note = 2'-O-methylguanosine-3'-phosphorothioate
  modified_base 3: mod_base = OTHER; note = 2'-O-methyluridine-3'-phosphate
  modified_base 4: mod_base = OTHER; note = 2'-O-methylguanosine-3'-phosphate
  modified_base 5: mod_base = OTHER; note = 2'-O-methylguanosine-3'-phosphate
  modified_base 6: mod_base = OTHER; note = 2'-O-methyluridine-3'-phosphate
  modified_base 7: mod_base = OTHER; note = 2'-deoxy-2'-fluoroguanosine-3'-phosphate
  modified_base 8: mod_base = OTHER; note = 2'-O-methyladenosine-3'-phosphate
  modified_base 9: mod_base = OTHER; note = 2'-deoxy-2'-fluoroguanosine-3'-phosphate
  modified_base 10: mod_base = OTHER; note = 2'-deoxy-2'-fluoroguanosine-3'-phosphate
  modified_base 11: mod_base = OTHER; note = 2'-deoxy-2'-fluorocytidine-3'-phosphate
  modified_base 12: mod_base = OTHER; note = 2'-O-methylguanosine-3'-phosphate
  modified_base 13: mod_base = OTHER; note = 2'-O-methyluridine-3'-phosphate
  modified_base 14: mod_base = OTHER; note = 2'-O-methylguanosine-3'-phosphate
  modified_base 15: mod_base = OTHER; note = 2'-O-methylguanosine-3'-phosphate
  modified_base 16: mod_base = OTHER; note = 2'-O-methyluridine-3'-phosphate
  modified_base 17: mod_base = OTHER; note = 2'-O-methyladenosine-3'-phosphate
  modified_base 18: mod_base = OTHER; note = 2'-O-methyluridine-3'-phosphate
  modified_base 19: mod_base = OTHER; note = 2'-O-methylguanosine-3'-phosphate
  modified_base 20: mod_base = OTHER; note = 2'-O-methyladenosine-3'-phosphate
  modified_base 21: mod_base = OTHER; note = 2'-O-methyluridine-3'-phosphate ((2S,4R)-1-[29-[[2-(acetylamino)-2-deoxy-beta-D-galactopyra nosyl]oxy]-14,14-bis[[3-[[3-[[5-[[2-(acetylamino)-2-deoxy-b eta-D-galactopyranosyl]oxy]-1-oxopentyl]amino]propyl]amino] -3-oxopropoxy]methyl]-1,12,19,25-tetraoxo-16-oxa-13,20,24-t riazanonacos-1-yl]-4-hydroxy-2-pyrrolidinyl)methyl ester
agtggtgaggcgtggtatgat

SEQ ID NO: 329 - RNA, 21 nt, synthetic construct
  source 1..21: mol_type = other RNA
  modified_base 1: mod_base = OTHER; note = 2'-O-methyladenosine-3'-phosphorothioate
  modified_base 2: mod_base = OTHER; note = 2'-O-methyladenosine-3'-phosphorothioate
  modified_base 3: mod_base = OTHER; note = 2'-O-methylcytidine-3'-phosphate
  modified_base 4: mod_base = OTHER; note = 2'-O-methylcytidine-3'-phosphate
  modified_base 5: mod_base = OTHER; note = 2'-O-methyluridine-3'-phosphate
  modified_base 6: mod_base = OTHER; note = 2'-O-methylcytidine-3'-phosphate
  modified_base 7: mod_base = OTHER; note = 2'-deoxy-2'-fluoroguanosine-3'-phosphate
  modified_base 8: mod_base = OTHER; note = 2'-O-methylguanosine-3'-phosphate
  modified_base 9: mod_base = OTHER; note = 2'-deoxy-2'-fluorouridine-3'-phosphate
  modified_base 10: mod_base = OTHER; note = 2'-deoxy-2'-fluoroguanosine-3'-phosphate
  modified_base 11: mod_base = OTHER; note = 2'-deoxy-2'-fluorocytidine-3'-phosphate
  modified_base 12: mod_base = OTHER; note = 2'-O-methyluridine-3'-phosphate
  modified_base 13: mod_base = OTHER; note = 2'-O-methyladenosine-3'-phosphate
  modified_base 14: mod_base = OTHER; note = 2'-O-methyluridine-3'-phosphate
  modified_base 15: mod_base = OTHER; note = 2'-O-methylguanosine-3'-phosphate
  modified_base 16: mod_base = OTHER; note = 2'-O-methylcytidine-3'-phosphate
  modified_base 17: mod_base = OTHER; note = 2'-O-methyluridine-3'-phosphate
  modified_base 18: mod_base = OTHER; note = 2'-O-methylguanosine-3'-phosphate
  modified_base 19: mod_base = OTHER; note = 2'-O-methylcytidine-3'-phosphate
  modified_base 20: mod_base = OTHER; note = 2'-O-methylguanosine-3'-phosphate
  modified_base 21: mod_base = OTHER; note = 2'-O-methyluridine-3'-phosphate ((2S,4R)-1-[29-[[2-(acetylamino)-2-deoxy-beta-D-galactopyra nosyl]oxy]-14,14-bis[[3-[[3-[[5-[[2-(acetylamino)-2-deoxy-b eta-D-galactopyranosyl]oxy]-1-oxopentyl]amino]propyl]amino] -3-oxopropoxy]methyl]-1,12,19,25-tetraoxo-16-oxa-13,20,24-t riazanonacos-1-yl]-4-hydroxy-2-pyrrolidinyl)methyl ester
aacctcggtgctatgctgcgt

SEQ ID NO: 330 - RNA, 21 nt, synthetic construct
  source 1..21: mol_type = other RNA
  modified_base 1: mod_base = OTHER; note = 2'-O-methylcytidine-3'-phosphorothioate
  modified_base 2: mod_base = OTHER; note = 2'-O-methylguanosine-3'-phosphorothioate
  modified_base 3: mod_base = OTHER; note = 2'-O-methylguanosine-3'-phosphate
  modified_base 4: mod_base = OTHER; note = 2'-O-methyluridine-3'-phosphate
  modified_base 5: mod_base = OTHER; note = 2'-O-methylguanosine-3'-phosphate
  modified_base 6: mod_base = OTHER; note = 2'-O-methylcytidine-3'-phosphate
  modified_base 7: mod_base = OTHER; note = 2'-deoxy-2'-fluorouridine-3'-phosphate
  modified_base 8: mod_base = OTHER; note = 2'-O-methyladenosine-3'-phosphate
  modified_base 9: mod_base = OTHER; note = 2'-deoxy-2'-fluorouridine-3'-phosphate
  modified_base 10: mod_base = OTHER; note = 2'-deoxy-2'-fluoroguanosine-3'-phosphate
  modified_base 11: mod_base = OTHER; note = 2'-deoxy-2'-fluorocytidine-3'-phosphate
  modified_base 12: mod_base = OTHER; note = 2'-O-methyluridine-3'-phosphate
  modified_base 13: mod_base = OTHER; note = 2'-O-methylguanosine-3'-phosphate
  modified_base 14: mod_base = OTHER; note = 2'-O-methylcytidine-3'-phosphate
  modified_base 15: mod_base = OTHER; note = 2'-O-methylguanosine-3'-phosphate
  modified_base 16: mod_base = OTHER; note = 2'-O-methylguanosine-3'-phosphate
  modified_base 17: mod_base = OTHER; note = 2'-O-methyluridine-3'-phosphate
  modified_base 18: mod_base = OTHER; note = 2'-O-methylguanosine-3'-phosphate
  modified_base 19: mod_base = OTHER; note = 2'-O-methyluridine-3'-phosphate
  modified_base 20: mod_base = OTHER; note = 2'-O-methylguanosine-3'-phosphate
  modified_base 21: mod_base = OTHER; note = 2'-O-methyluridine-3'-phosphate ((2S,4R)-1-[29-[[2-(acetylamino)-2-deoxy-beta-D-galactopyra nosyl]oxy]-14,14-bis[[3-[[3-[[5-[[2-(acetylamino)-2-deoxy-b eta-D-galactopyranosyl]oxy]-1-oxopentyl]amino]propyl]amino] -3-oxopropoxy]methyl]-1,12,19,25-tetraoxo-16-oxa-13,20,24-t riazanonacos-1-yl]-4-hydroxy-2-pyrrolidinyl)methyl ester
cggtgctatgctgcggtgtgt

SEQ ID NO: 331 - RNA, 21 nt, synthetic construct
  source 1..21: mol_type = other RNA
  modified_base 1: mod_base = OTHER; note = 2'-O-methylcytidine-3'-phosphorothioate
  modified_base 2: mod_base = OTHER; note = 2'-O-methyluridine-3'-phosphorothioate
  modified_base 3: mod_base = OTHER; note = 2'-O-methyladenosine-3'-phosphate
  modified_base 4: mod_base = OTHER; note = 2'-O-methyluridine-3'-phosphate
  modified_base 5: mod_base = OTHER; note = 2'-O-methylguanosine-3'-phosphate
  modified_base 6: mod_base = OTHER; note = 2'-O-methylcytidine-3'-phosphate
  modified_base 7: mod_base = OTHER; note = 2'-deoxy-2'-fluorouridine-3'-phosphate
  modified_base 8: mod_base = OTHER; note = 2'-O-methylguanosine-3'-phosphate
  modified_base 9: mod_base = OTHER; note = 2'-deoxy-2'-fluorocytidine-3'-phosphate
  modified_base 10: mod_base = OTHER; note = 2'-deoxy-2'-fluoroguanosine-3'-phosphate
  modified_base 11: mod_base = OTHER; note = 2'-deoxy-2'-fluoroguanosine-3'-phosphate
  modified_base 12: mod_base = OTHER; note = 2'-O-methyluridine-3'-phosphate
  modified_base 13: mod_base = OTHER; note = 2'-O-methylguanosine-3'-phosphate
  modified_base 14: mod_base = OTHER; note = 2'-O-methyluridine-3'-phosphate
  modified_base 15: mod_base = OTHER; note = 2'-O-methylguanosine-3'-phosphate
  modified_base 16: mod_base = OTHER; note = 2'-O-methyluridine-3'-phosphate
  modified_base 17: mod_base = OTHER; note = 2'-O-methylguanosine-3'-phosphate
  modified_base 18: mod_base = OTHER; note = 2'-O-methylguanosine-3'-phosphate
  modified_base 19: mod_base = OTHER; note = 2'-O-methyladenosine-3'-phosphate
  modified_base 20: mod_base = OTHER; note = 2'-O-methylcytidine-3'-phosphate
  modified_base 21: mod_base = OTHER; note = 2'-O-methyluridine-3'-phosphate ((2S,4R)-1-[29-[[2-(acetylamino)-2-deoxy-beta-D-galactopyra nosyl]oxy]-14,14-bis[[3-[[3-[[5-[[2-(acetylamino)-2-deoxy-b eta-D-galactopyranosyl]oxy]-1-oxopentyl]amino]propyl]amino] -3-oxopropoxy]methyl]-1,12,19,25-tetraoxo-16-oxa-13,20,24-t riazanonacos-1-yl]-4-hydroxy-2-pyrrolidinyl)methyl ester
ctatgctgcggtgtgtggact

SEQ ID NO: 332 - RNA, 21 nt, synthetic construct
  source 1..21: mol_type = other RNA
  modified_base 1: mod_base = OTHER; note = 2'-O-methylcytidine-3'-phosphorothioate
  modified_base 2: mod_base = OTHER; note = 2'-O-methylguanosine-3'-phosphorothioate
  modified_base 3: mod_base = OTHER; note = 2'-O-methylguanosine-3'-phosphate
  modified_base 4: mod_base = OTHER; note = 2'-O-methyluridine-3'-phosphate
  modified_base 5: mod_base = OTHER; note = 2'-O-methylguanosine-3'-phosphate
  modified_base 6: mod_base = OTHER; note = 2'-O-methyluridine-3'-phosphate
  modified_base 7: mod_base = OTHER; note = 2'-deoxy-2'-fluoroguanosine-3'-phosphate
  modified_base 8: mod_base = OTHER; note = 2'-O-methyluridine-3'-phosphate
  modified_base 9: mod_base = OTHER; note = 2'-deoxy-2'-fluoroguanosine-3'-phosphate
  modified_base 10: mod_base = OTHER; note = 2'-deoxy-2'-fluoroguanosine-3'-phosphate
  modified_base 11: mod_base = OTHER; note = 2'-deoxy-2'-fluoroadenosine-3'-phosphate
  modified_base 12: mod_base = OTHER; note = 2'-O-methylcytidine-3'-phosphate
  modified_base 13: mod_base = OTHER; note = 2'-O-methylcytidine-3'-phosphate
  modified_base 14: mod_base = OTHER; note = 2'-O-methyluridine-3'-phosphate
  modified_base 15: mod_base = OTHER; note = 2'-O-methylguanosine-3'-phosphate
  modified_base 16: mod_base = OTHER; note = 2'-O-methyluridine-3'-phosphate
  modified_base 17: mod_base = OTHER; note = 2'-O-methylcytidine-3'-phosphate
  modified_base 18: mod_base = OTHER; note = 2'-O-methyladenosine-3'-phosphate
  modified_base 19: mod_base = OTHER; note = 2'-O-methylcytidine-3'-phosphate
  modified_base 20: mod_base = OTHER; note = 2'-O-methylguanosine-3'-phosphate
  modified_base 21: mod_base = OTHER; note = 2'-O-methyluridine-3'-phosphate ((2S,4R)-1-[29-[[2-(acetylamino)-2-deoxy-beta-D-galactopyra nosyl]oxy]-14,14-bis[[3-[[3-[[5-[[2-(acetylamino)-2-deoxy-b eta-D-galactopyranosyl]oxy]-1-oxopentyl]amino]propyl]amino] -3-oxopropoxy]methyl]-1,12,19,25-tetraoxo-16-oxa-13,20,24-t riazanonacos-1-yl]-4-hydroxy-2-pyrrolidinyl)methyl ester
cggtgtgtggacctgtcacgt

SEQ ID NO: 333 - RNA, 21 nt, synthetic construct
  source 1..21: mol_type = other RNA
  modified_base 1: mod_base = OTHER; note = 2'-O-methylguanosine-3'-phosphorothioate
  modified_base 2: mod_base = OTHER; note = 2'-O-methylguanosine-3'-phosphorothioate
  modified_base 3: mod_base = OTHER; note = 2'-O-methylcytidine-3'-phosphate
  modified_base 4: mod_base = OTHER; note = 2'-O-methylcytidine-3'-phosphate
  modified_base 5: mod_base = OTHER; note = 2'-O-methyladenosine-3'-phosphate
  modified_base 6: mod_base = OTHER; note = 2'-O-methylguanosine-3'-phosphate
  modified_base 7: mod_base = OTHER; note = 2'-deoxy-2'-fluorocytidine-3'-phosphate
  modified_base 8: mod_base = OTHER; note = 2'-O-methylcytidine-3'-phosphate
  modified_base 9: mod_base = OTHER; note = 2'-deoxy-2'-fluorouridine-3'-phosphate
  modified_base 10: mod_base = OTHER; note = 2'-deoxy-2'-fluorocytidine-3'-phosphate
  modified_base 11: mod_base = OTHER; note = 2'-deoxy-2'-fluoroadenosine-3'-phosphate
  modified_base 12: mod_base = OTHER; note = 2'-O-methyluridine-3'-phosphate
  modified_base 13: mod_base = OTHER; note = 2'-O-methylguanosine-3'-phosphate
  modified_base 14: mod_base = OTHER; note = 2'-O-methylcytidine-3'-phosphate
  modified_base 15: mod_base = OTHER; note = 2'-O-methyladenosine-3'-phosphate
  modified_base 16: mod_base = OTHER; note = 2'-O-methylguanosine-3'-phosphate
  modified_base 17: mod_base = OTHER; note = 2'-O-methylcytidine-3'-phosphate
  modified_base 18: mod_base = OTHER; note = 2'-O-methyluridine-3'-phosphate
  modified_base 19: mod_base = OTHER; note = 2'-O-methylguanosine-3'-phosphate
  modified_base 20: mod_base = OTHER; note = 2'-O-methyladenosine-3'-phosphate
  modified_base 21: mod_base = OTHER; note = 2'-O-methyluridine-3'-phosphate ((2S,4R)-1-[29-[[2-(acetylamino)-2-deoxy-beta-D-galactopyra nosyl]oxy]-14,14-bis[[3-[[3-[[5-[[2-(acetylamino)-2-deoxy-b eta-D-galactopyranosyl]oxy]-1-oxopentyl]amino]propyl]amino] -3-oxopropoxy]methyl]-1,12,19,25-tetraoxo-16-oxa-13,20,24-t riazanonacos-1-yl]-4-hydroxy-2-pyrrolidinyl)methyl ester
ggccagcctcatgcagctgat

SEQ ID NO: 334 - RNA, 21 nt, synthetic construct
  source 1..21: mol_type = other RNA
  modified_base 1: mod_base = OTHER; note = 2'-O-methylguanosine-3'-phosphorothioate
  modified_base 2: mod_base = OTHER; note = 2'-O-methylcytidine-3'-phosphorothioate
  modified_base 3: mod_base = OTHER; note = 2'-O-methylcytidine-3'-phosphate
  modified_base 4: mod_base = OTHER; note = 2'-O-methyluridine-3'-phosphate
  modified_base 5: mod_base = OTHER; note = 2'-O-methylcytidine-3'-phosphate
  modified_base 6: mod_base = OTHER; note = 2'-O-methyladenosine-3'-phosphate
  modified_base 7: mod_base = OTHER; note = 2'-deoxy-2'-fluorouridine-3'-phosphate
  modified_base 8: mod_base = OTHER; note = 2'-O-methylguanosine-3'-phosphate
  modified_base 9: mod_base = OTHER; note = 2'-deoxy-2'-fluorocytidine-3'-phosphate
  modified_base 10: mod_base = OTHER; note = 2'-deoxy-2'-fluoroadenosine-3'-phosphate
  modified_base 11: mod_base = OTHER; note = 2'-deoxy-2'-fluoroguanosine-3'-phosphate
  modified_base 12: mod_base = OTHER; note = 2'-O-methylcytidine-3'-phosphate
  modified_base 13: mod_base = OTHER; note = 2'-O-methyluridine-3'-phosphate
  modified_base 14: mod_base = OTHER; note = 2'-O-methylguanosine-3'-phosphate
  modified_base 15: mod_base = OTHER; note = 2'-O-methyladenosine-3'-phosphate
  modified_base 16: mod_base = OTHER; note = 2'-O-methyladenosine-3'-phosphate
  modified_base 17: mod_base = OTHER; note = 2'-O-methylguanosine-3'-phosphate
  modified_base 18: mod_base = OTHER; note = 2'-O-methylguanosine-3'-phosphate
  modified_base 19: mod_base = OTHER; note = 2'-O-methyluridine-3'-phosphate
  modified_base 20: mod_base = OTHER; note = 2'-O-methylguanosine-3'-phosphate
  modified_base 21: mod_base = OTHER; note = 2'-O-methyluridine-3'-phosphate ((2S,4R)-1-[29-[[2-(acetylamino)-2-deoxy-beta-D-galactopyra nosyl]oxy]-14,14-bis[[3-[[3-[[5-[[2-(acetylamino)-2-deoxy-b eta-D-galactopyranosyl]oxy]-1-oxopentyl]amino]propyl]amino] -3-oxopropoxy]methyl]-1,12,19,25-tetraoxo-16-oxa-13,20,24-t riazanonacos-1-yl]-4-hydroxy-2-pyrrolidinyl)methyl ester
gcctcatgcagctgaaggtgt

SEQ ID NO: 335 - RNA, 21 nt, synthetic construct
  source 1..21: mol_type = other RNA
  modified_base 1: mod_base = OTHER; note = 2'-O-methyladenosine-3'-phosphorothioate
  modified_base 2: mod_base = OTHER; note = 2'-O-methyluridine-3'-phosphorothioate
  modified_base 3: mod_base = OTHER; note = 2'-O-methylguanosine-3'-phosphate
  modified_base 4: mod_base = OTHER; note = 2'-O-methylcytidine-3'-phosphate
  modified_base 5: mod_base = OTHER; note = 2'-O-methyladenosine-3'-phosphate
  modified_base 6: mod_base = OTHER; note = 2'-O-methylguanosine-3'-phosphate
  modified_base 7: mod_base = OTHER; note = 2'-deoxy-2'-fluorocytidine-3'-phosphate
  modified_base 8: mod_base = OTHER; note = 2'-O-methyluridine-3'-phosphate
  modified_base 9: mod_base = OTHER; note = 2'-deoxy-2'-fluoroguanosine-3'-phosphate
  modified_base 10: mod_base = OTHER; note = 2'-deoxy-2'-fluoroadenosine-3'-phosphate
  modified_base 11: mod_base = OTHER; note = 2'-deoxy-2'-fluoroadenosine-3'-phosphate
  modified_base 12: mod_base = OTHER; note = 2'-O-methylguanosine-3'-phosphate
  modified_base 13: mod_base = OTHER; note = 2'-O-methylguanosine-3'-phosphate
  modified_base 14: mod_base = OTHER; note = 2'-O-methyluridine-3'-phosphate
  modified_base 15: mod_base = OTHER; note = 2'-O-methylguanosine-3'-phosphate
  modified_base 16: mod_base = OTHER; note = 2'-O-methyladenosine-3'-phosphate
  modified_base 17: mod_base = OTHER; note = 2'-O-methylcytidine-3'-phosphate
  modified_base 18: mod_base = OTHER; note = 2'-O-methylguanosine-3'-phosphate
  modified_base 19: mod_base = OTHER; note = 2'-O-methylguanosine-3'-phosphate
  modified_base 20: mod_base = OTHER; note = 2'-O-methylcytidine-3'-phosphate
  modified_base 21: mod_base = OTHER; note = 2'-O-methyluridine-3'-phosphate ((2S,4R)-1-[29-[[2-(acetylamino)-2-deoxy-beta-D-galactopyra nosyl]oxy]-14,14-bis[[3-[[3-[[5-[[2-(acetylamino)-2-deoxy-b eta-D-galactopyranosyl]oxy]-1-oxopentyl]amino]propyl]amino] -3-oxopropoxy]methyl]-1,12,19,25-tetraoxo-16-oxa-13,20,24-t riazanonacos-1-yl]-4-hydroxy-2-pyrrolidinyl)methyl ester
atgcagctgaaggtgacggct

SEQ ID NO: 336 - RNA, 21 nt, synthetic construct
  source 1..21: mol_type = other RNA
  modified_base 1: mod_base = OTHER; note = 2'-O-methylguanosine-3'-phosphorothioate
  modified_base 2: mod_base = OTHER; note = 2'-O-methylcytidine-3'-phosphorothioate
  modified_base 3: mod_base = OTHER; note = 2'-O-methyluridine-3'-phosphate
  modified_base 4: mod_base = OTHER; note = 2'-O-methylguanosine-3'-phosphate
  modified_base 5: mod_base = OTHER; note = 2'-O-methyladenosine-3'-phosphate
  modified_base 6: mod_base = OTHER; note = 2'-O-methyladenosine-3'-phosphate
  modified_base 7: mod_base = OTHER; note = 2'-deoxy-2'-fluoroguanosine-3'-phosphate
  modified_base 8: mod_base = OTHER; note = 2'-O-methylguanosine-3'-phosphate
  modified_base 9: mod_base = OTHER; note = 2'-deoxy-2'-fluorouridine-3'-phosphate
  modified_base 10: mod_base = OTHER; note = 2'-deoxy-2'-fluoroguanosine-3'-phosphate
  modified_base 11: mod_base = OTHER; note = 2'-deoxy-2'-fluoroadenosine-3'-phosphate
  modified_base 12: mod_base = OTHER; note = 2'-O-methylcytidine-3'-phosphate
  modified_base 13: mod_base = OTHER; note = 2'-O-methylguanosine-3'-phosphate
  modified_base 14: mod_base = OTHER; note = 2'-O-methylguanosine-3'-phosphate
  modified_base 15: mod_base = OTHER; note = 2'-O-methylcytidine-3'-phosphate
  modified_base 16: mod_base = OTHER; note = 2'-O-methylguanosine-3'-phosphate
  modified_base 17: mod_base = OTHER; note = 2'-O-methylcytidine-3'-phosphate
  modified_base 18: mod_base = OTHER; note = 2'-O-methyluridine-3'-phosphate
  modified_base 19: mod_base = OTHER; note = 2'-O-methylguanosine-3'-phosphate
  modified_base 20: mod_base = OTHER; note = 2'-O-methyladenosine-3'-phosphate
  modified_base 21: mod_base = OTHER; note = 2'-O-methyluridine-3'-phosphate ((2S,4R)-1-[29-[[2-(acetylamino)-2-deoxy-beta-D-galactopyra nosyl]oxy]-14,14-bis[[3-[[3-[[5-[[2-(acetylamino)-2-deoxy-b eta-D-galactopyranosyl]oxy]-1-oxopentyl]amino]propyl]amino] -3-oxopropoxy]methyl]-1,12,19,25-tetraoxo-16-oxa-13,20,24-t riazanonacos-1-yl]-4-hydroxy-2-pyrrolidinyl)methyl ester
gctgaaggtgacggcgctgat

SEQ ID NO: 337 - RNA, 21 nt, synthetic construct
  source 1..21: mol_type = other RNA
  modified_base 1: mod_base = OTHER; note = 2'-O-methylguanosine-3'-phosphorothioate
  modified_base 2: mod_base = OTHER; note = 2'-O-methylguanosine-3'-phosphorothioate
  modified_base 3: mod_base = OTHER; note = 2'-O-methyluridine-3'-phosphate
  modified_base 4: mod_base = OTHER; note = 2'-O-methylguanosine-3'-phosphate
  modified_base 5: mod_base = OTHER; note = 2'-O-methyladenosine-3'-phosphate
  modified_base 6: mod_base = OTHER; note = 2'-O-methylcytidine-3'-phosphate
  modified_base 7: mod_base = OTHER; note = 2'-deoxy-2'-fluoroguanosine-3'-phosphate
  modified_base 8: mod_base = OTHER; note = 2'-O-methylguanosine-3'-phosphate
  modified_base 9: mod_base = OTHER; note = 2'-deoxy-2'-fluorocytidine-3'-phosphate
  modified_base 10: mod_base = OTHER; note = 2'-deoxy-2'-fluoroguanosine-3'-phosphate
  modified_base 11: mod_base = OTHER; note = 2'-deoxy-2'-fluorocytidine-3'-phosphate
  modified_base 12: mod_base = OTHER; note = 2'-O-methyluridine-3'-phosphate
  modified_base 13: mod_base = OTHER; note = 2'-O-methylguanosine-3'-phosphate
  modified_base 14: mod_base = OTHER; note = 2'-O-methyladenosine-3'-phosphate
  modified_base 15: mod_base = OTHER; note = 2'-O-methylcytidine-3'-phosphate
  modified_base 16: mod_base = OTHER; note = 2'-O-methylcytidine-3'-phosphate
  modified_base 17: mod_base = OTHER; note = 2'-O-methyladenosine-3'-phosphate
  modified_base 18: mod_base = OTHER; note = 2'-O-methylguanosine-3'-phosphate
  modified_base 19: mod_base = OTHER; note = 2'-O-methyluridine-3'-phosphate
  modified_base 20: mod_base = OTHER; note = 2'-O-methyladenosine-3'-phosphate
  modified_base 21: mod_base = OTHER; note = 2'-O-methyluridine-3'-phosphate ((2S,4R)-1-[29-[[2-(acetylamino)-2-deoxy-beta-D-galactopyra nosyl]oxy]-14,14-bis[[3-[[3-[[5-[[2-(acetylamino)-2-deoxy-b eta-D-galactopyranosyl]oxy]-1-oxopentyl]amino]propyl]amino] -3-oxopropoxy]methyl]-1,12,19,25-tetraoxo-16-oxa-13,20,24-t riazanonacos-1-yl]-4-hydroxy-2-pyrrolidinyl)methyl ester
ggtgacggcgctgaccagtat

SEQ ID NO: 338 - RNA, 21 nt, synthetic construct
  source 1..21: mol_type = other RNA
  modified_base 1: mod_base = OTHER; note = 2'-O-methylguanosine-3'-phosphorothioate
  modified_base 2: mod_base = OTHER; note = 2'-O-methylcytidine-3'-phosphorothioate
  modified_base 3: mod_base = OTHER; note = 2'-O-methyluridine-3'-phosphate
  modified_base 4: mod_base = OTHER; note = 2'-O-methylguanosine-3'-phosphate
  modified_base 5: mod_base = OTHER; note = 2'-O-methyladenosine-3'-phosphate
  modified_base 6: mod_base = OTHER; note = 2'-O-methylcytidine-3'-phosphate
  modified_base 7: mod_base = OTHER; note = 2'-deoxy-2'-fluorocytidine-3'-phosphate
  modified_base 8: mod_base = OTHER; note = 2'-O-methyladenosine-3'-phosphate
  modified_base 9: mod_base = OTHER; note = 2'-deoxy-2'-fluoroguanosine-3'-phosphate
  modified_base 10: mod_base = OTHER; note = 2'-deoxy-2'-fluorouridine-3'-phosphate
  modified_base 11: mod_base = OTHER; note = 2'-deoxy-2'-fluoroadenosine-3'-phosphate
  modified_base 12: mod_base = OTHER; note = 2'-O-methylcytidine-3'-phosphate
  modified_base 13: mod_base = OTHER; note = 2'-O-methyluridine-3'-phosphate
  modified_base 14: mod_base = OTHER; note = 2'-O-methylcytidine-3'-phosphate
  modified_base 15: mod_base = OTHER; note = 2'-O-methylguanosine-3'-phosphate
  modified_base 16: mod_base = OTHER; note = 2'-O-methylguanosine-3'-phosphate
  modified_base 17: mod_base = OTHER; note = 2'-O-methylcytidine-3'-phosphate
  modified_base 18: mod_base = OTHER; note = 2'-O-methyluridine-3'-phosphate
  modified_base 19: mod_base = OTHER; note = 2'-O-methylcytidine-3'-phosphate
  modified_base 20: mod_base = OTHER; note = 2'-O-methyluridine-3'-phosphate
  modified_base 21: mod_base = OTHER; note = 2'-O-methyluridine-3'-phosphate ((2S,4R)-1-[29-[[2-(acetylamino)-2-deoxy-beta-D-galactopyra nosyl]oxy]-14,14-bis[[3-[[3-[[5-[[2-(acetylamino)-2-deoxy-b eta-D-galactopyranosyl]oxy]-1-oxopentyl]amino]propyl]amino] -3-oxopropoxy]methyl]-1,12,19,25-tetraoxo-16-oxa-13,20,24-t riazanonacos-1-yl]-4-hydroxy-2-pyrrolidinyl)methyl ester
gctgaccagtactcggctctt

SEQ ID NO: 339 - RNA, 21 nt, synthetic construct
  source 1..21: mol_type = other RNA
  modified_base 1: mod_base = OTHER; note = 2'-O-methyladenosine-3'-phosphorothioate
  modified_base 2: mod_base = OTHER; note = 2'-O-methylguanosine-3'-phosphorothioate
  modified_base 3: mod_base = OTHER; note = 2'-O-methyluridine-3'-phosphate
  modified_base 4: mod_base = OTHER; note = 2'-O-methyladenosine-3'-phosphate
  modified_base 5: mod_base = OTHER; note = 2'-O-methylcytidine-3'-phosphate
  modified_base 6: mod_base = OTHER; note = 2'-O-methyluridine-3'-phosphate
  modified_base 7: mod_base = OTHER; note = 2'-deoxy-2'-fluorocytidine-3'-phosphate
  modified_base 8: mod_base = OTHER; note = 2'-O-methylguanosine-3'-phosphate
  modified_base 9: mod_base = OTHER; note = 2'-deoxy-2'-fluoroguanosine-3'-phosphate
  modified_base 10: mod_base = OTHER; note = 2'-deoxy-2'-fluorocytidine-3'-phosphate
  modified_base 11: mod_base = OTHER; note = 2'-deoxy-2'-fluorouridine-3'-phosphate
  modified_base 12: mod_base = OTHER; note = 2'-O-methylcytidine-3'-phosphate
  modified_base 13: mod_base = OTHER; note = 2'-O-methyluridine-3'-phosphate
  modified_base 14: mod_base = OTHER; note = 2'-O-methylguanosine-3'-phosphate
  modified_base 15: mod_base = OTHER; note = 2'-O-methyluridine-3'-phosphate
  modified_base 16: mod_base = OTHER; note = 2'-O-methyladenosine-3'-phosphate
  modified_base 17: mod_base = OTHER; note = 2'-O-methyladenosine-3'-phosphate
  modified_base 18: mod_base = OTHER; note = 2'-O-methylguanosine-3'-phosphate
  modified_base 19: mod_base = OTHER; note = 2'-O-methylguanosine-3'-phosphate
  modified_base 20: mod_base = OTHER; note = 2'-O-methyladenosine-3'-phosphate
  modified_base 21: mod_base = OTHER; note = 2'-O-methyluridine-3'-phosphate ((2S,4R)-1-[29-[[2-(acetylamino)-2-deoxy-beta-D-galactopyra nosyl]oxy]-14,14-bis[[3-[[3-[[5-[[2-(acetylamino)-2-deoxy-b eta-D-galactopyranosyl]oxy]-1-oxopentyl]amino]propyl]amino] -3-oxopropoxy]methyl]-1,12,19,25-tetraoxo-16-oxa-13,20,24-t riazanonacos-1-yl]-4-hydroxy-2-pyrrolidinyl)methyl ester
agtactcggctctgtaaggat

SEQ ID NO: 340 - RNA, 21 nt, synthetic construct
  source 1..21: mol_type = other RNA
  modified_base 1: mod_base = OTHER; note = 2'-O-methyluridine-3'-phosphorothioate
  modified_base 2: mod_base = OTHER; note = 2'-O-methylcytidine-3'-phosphorothioate
  modified_base 3: mod_base = OTHER; note = 2'-O-methylguanosine-3'-phosphate
  modified_base 4: mod_base = OTHER; note = 2'-O-methylguanosine-3'-phosphate
  modified_base 5: mod_base = OTHER; note = 2'-O-methylcytidine-3'-phosphate
  modified_base 6: mod_base = OTHER; note = 2'-O-methyluridine-3'-phosphate
  modified_base 7: mod_base = OTHER; note = 2'-deoxy-2'-fluorocytidine-3'-phosphate
  modified_base 8: mod_base = OTHER; note = 2'-O-methyluridine-3'-phosphate
  modified_base 9: mod_base = OTHER; note = 2'-deoxy-2'-fluoroguanosine-3'-phosphate
  modified_base 10: mod_base = OTHER; note = 2'-deoxy-2'-fluorouridine-3'-phosphate
  modified_base 11: mod_base = OTHER; note = 2'-deoxy-2'-fluoroadenosine-3'-phosphate
  modified_base 12: mod_base = OTHER; note = 2'-O-methyladenosine-3'-phosphate
  modified_base 13: mod_base = OTHER; note = 2'-O-methylguanosine-3'-phosphate
  modified_base 14: mod_base = OTHER; note = 2'-O-methylguanosine-3'-phosphate
  modified_base 15: mod_base = OTHER; note = 2'-O-methyladenosine-3'-phosphate
  modified_base 16: mod_base = OTHER; note = 2'-O-methylguanosine-3'-phosphate
  modified_base 17: mod_base = OTHER; note = 2'-O-methylcytidine-3'-phosphate
  modified_base 18: mod_base = OTHER; note = 2'-O-methyluridine-3'-phosphate
  modified_base 19: mod_base = OTHER; note = 2'-O-methyladenosine-3'-phosphate
  modified_base 20: mod_base = OTHER; note = 2'-O-methylguanosine-3'-phosphate
  modified_base 21: mod_base = OTHER; note = 2'-O-methyluridine-3'-phosphate ((2S,4R)-1-[29-[[2-(acetylamino)-2-deoxy-beta-D-galactopyra nosyl]oxy]-14,14-bis[[3-[[3-[[5-[[2-(acetylamino)-2-deoxy-b eta-D-galactopyranosyl]oxy]-1-oxopentyl]amino]propyl]amino] -3-oxopropoxy]methyl]-1,12,19,25-tetraoxo-16-oxa-13,20,24-t riazanonacos-1-yl]-4-hydroxy-2-pyrrolidinyl)methyl ester
tcggctctgtaaggagctagt

SEQ ID NO: 341 - RNA, 21 nt, synthetic construct
  source 1..21: mol_type = other RNA
  modified_base 1: mod_base = OTHER; note = 2'-O-methylcytidine-3'-phosphorothioate
  modified_base 2: mod_base = OTHER; note = 2'-O-methyluridine-3'-phosphorothioate
  modified_base 3: mod_base = OTHER; note = 2'-O-methylguanosine-3'-phosphate
  modified_base 4: mod_base = OTHER; note = 2'-O-methyluridine-3'-phosphate
  modified_base 5: mod_base = OTHER; note = 2'-O-methyladenosine-3'-phosphate
  modified_base 6: mod_base = OTHER; note = 2'-O-methyladenosine-3'-phosphate
  modified_base 7: mod_base = OTHER; note = 2'-deoxy-2'-fluoroguanosine-3'-phosphate
  modified_base 8: mod_base = OTHER; note = 2'-O-methylguanosine-3'-phosphate
  modified_base 9: mod_base = OTHER; note = 2'-deoxy-2'-fluoroadenosine-3'-phosphate
  modified_base 10: mod_base = OTHER; note = 2'-deoxy-2'-fluoroguanosine-3'-phosphate
  modified_base 11: mod_base = OTHER; note = 2'-deoxy-2'-fluorocytidine-3'-phosphate
  modified_base 12: mod_base = OTHER; note = 2'-O-methyluridine-3'-phosphate
  modified_base 13: mod_base = OTHER; note = 2'-O-methyladenosine-3'-phosphate
  modified_base 14: mod_base = OTHER; note = 2'-O-methylguanosine-3'-phosphate
  modified_base 15: mod_base = OTHER; note = 2'-O-methylcytidine-3'-phosphate
  modified_base 16: mod_base = OTHER; note = 2'-O-methylcytidine-3'-phosphate
  modified_base 17: mod_base = OTHER; note = 2'-O-methyluridine-3'-phosphate
  modified_base 18: mod_base = OTHER; note = 2'-O-methylcytidine-3'-phosphate
  modified_base 19: mod_base = OTHER; note = 2'-O-methylguanosine-3'-phosphate
  modified_base 20: mod_base = OTHER; note = 2'-O-methyluridine-3'-phosphate
  modified_base 21: mod_base = OTHER; note = 2'-O-methyluridine-3'-phosphate ((2S,4R)-1-[29-[[2-(acetylamino)-2-deoxy-beta-D-galactopyra nosyl]oxy]-14,14-bis[[3-[[3-[[5-[[2-(acetylamino)-2-deoxy-b eta-D-galactopyranosyl]oxy]-1-oxopentyl]amino]propyl]amino] -3-oxopropoxy]methyl]-1,12,19,25-tetraoxo-16-oxa-13,20,24-t riazanonacos-1-yl]-4-hydroxy-2-pyrrolidinyl)methyl ester
ctgtaaggagctagcctcgtt

SEQ ID NO: 342 - RNA, 21 nt, synthetic construct
  source 1..21: mol_type = other RNA
  modified_base 1: mod_base = OTHER; note = 2'-O-methyladenosine-3'-phosphorothioate
  modified_base 2: mod_base = OTHER; note = 2'-O-methylguanosine-3'-phosphorothioate
  modified_base 3: mod_base = OTHER; note = 2'-O-methylguanosine-3'-phosphate
  modified_base 4: mod_base = OTHER; note = 2'-O-methyladenosine-3'-phosphate
  modified_base 5: mod_base = OTHER; note = 2'-O-methylguanosine-3'-phosphate
  modified_base 6: mod_base = OTHER; note = 2'-O-methylcytidine-3'-phosphate
  modified_base 7: mod_base = OTHER; note = 2'-deoxy-2'-fluorouridine-3'-phosphate
  modified_base 8: mod_base = OTHER; note = 2'-O-methyladenosine-3'-phosphate
  modified_base 9: mod_base = OTHER; note = 2'-deoxy-2'-fluoroguanosine-3'-phosphate
  modified_base 10: mod_base = OTHER; note = 2'-deoxy-2'-fluorocytidine-3'-phosphate
  modified_base 11: mod_base = OTHER; note = 2'-deoxy-2'-fluorocytidine-3'-phosphate
  modified_base 12: mod_base = OTHER; note = 2'-O-methyluridine-3'-phosphate
  modified_base 13: mod_base = OTHER; note = 2'-O-methylcytidine-3'-phosphate
  modified_base 14: mod_base = OTHER; note = 2'-O-methylguanosine-3'-phosphate
  modified_base 15: mod_base = OTHER; note = 2'-O-methyluridine-3'-phosphate
  modified_base 16: mod_base = OTHER; note = 2'-O-methylguanosine-3'-phosphate
  modified_base 17: mod_base = OTHER; note = 2'-O-methylguanosine-3'-phosphate
  modified_base 18: mod_base = OTHER; note = 2'-O-methylguanosine-3'-phosphate
  modified_base 19: mod_base = OTHER; note = 2'-O-methyluridine-3'-phosphate
  modified_base 20: mod_base = OTHER; note = 2'-O-methylcytidine-3'-phosphate
  modified_base 21: mod_base = OTHER; note = 2'-O-methyluridine-3'-phosphate ((2S,4R)-1-[29-[[2-(acetylamino)-2-deoxy-beta-D-galactopyra nosyl]oxy]-14,14-bis[[3-[[3-[[5-[[2-(acetylamino)-2-deoxy-b eta-D-galactopyranosyl]oxy]-1-oxopentyl]amino]propyl]amino] -3-oxopropoxy]methyl]-1,12,19,25-tetraoxo-16-oxa-13,20,24-t riazanonacos-1-yl]-4-hydroxy-2-pyrrolidinyl)methyl ester
aggagctagcctcgtgggtct

SEQ ID NO: 343 - RNA, 21 nt, synthetic construct
  source 1..21: mol_type = other RNA
  modified_base 1: mod_base = OTHER; note = 2'-O-methyladenosine-3'-phosphorothioate
  modified_base 2: mod_base = OTHER; note = 2'-O-methylguanosine-3'-phosphorothioate
  modified_base 3: mod_base = OTHER; note = 2'-O-methylcytidine-3'-phosphate
  modified_base 4: mod_base = OTHER; note = 2'-O-methylcytidine-3'-phosphate
  modified_base 5: mod_base = OTHER; note = 2'-O-methyluridine-3'-phosphate
  modified_base 6: mod_base = OTHER; note = 2'-O-methylcytidine-3'-phosphate
  modified_base 7: mod_base = OTHER; note = 2'-deoxy-2'-fluoroguanosine-3'-phosphate
  modified_base 8: mod_base = OTHER; note = 2'-O-methyluridine-3'-phosphate
  modified_base 9: mod_base = OTHER; note = 2'-deoxy-2'-fluoroguanosine-3'-phosphate
  modified_base 10: mod_base = OTHER; note = 2'-deoxy-2'-fluoroguanosine-3'-phosphate
  modified_base 11: mod_base = OTHER; note = 2'-deoxy-2'-fluoroguanosine-3'-phosphate
  modified_base 12: mod_base = OTHER; note = 2'-O-methyluridine-3'-phosphate
  modified_base 13: mod_base = OTHER; note = 2'-O-methylcytidine-3'-phosphate
  modified_base 14: mod_base = OTHER; note = 2'-O-methyladenosine-3'-phosphate
  modified_base 15: mod_base = OTHER; note = 2'-O-methylguanosine-3'-phosphate
  modified_base 16: mod_base = OTHER; note = 2'-O-methyladenosine-3'-phosphate
  modified_base 17: mod_base = OTHER; note = 2'-O-methyladenosine-3'-phosphate
  modified_base 18: mod_base = OTHER; note = 2'-O-methylguanosine-3'-phosphate
  modified_base 19: mod_base = OTHER; note = 2'-O-methylguanosine-3'-phosphate
  modified_base 20: mod_base = OTHER; note = 2'-O-methylcytidine-3'-phosphate
  modified_base 21: mod_base = OTHER; note = 2'-O-methyluridine-3'-phosphate ((2S,4R)-1-[29-[[2-(acetylamino)-2-deoxy-beta-D-galactopyra nosyl]oxy]-14,14-bis[[3-[[3-[[5-[[2-(acetylamino)-2-deoxy-b eta-D-galactopyranosyl]oxy]-1-oxopentyl]amino]propyl]amino] -3-oxopropoxy]methyl]-1,12,19,25-tetraoxo-16-oxa-13,20,24-t riazanonacos-1-yl]-4-hydroxy-2-pyrrolidinyl)methyl ester
agcctcgtgggtcagaaggct

SEQ ID NO: 344 - RNA, 21 nt, synthetic construct
  source 1..21: mol_type = other RNA
  modified_base 1: mod_base = OTHER; note = 2'-O-methylguanosine-3'-phosphorothioate
  modified_base 2: mod_base = OTHER; note = 2'-O-methyluridine-3'-phosphorothioate
  modified_base 3: mod_base = OTHER; note = 2'-O-methylguanosine-3'-phosphate
  modified_base 4: mod_base = OTHER; note = 2'-O-methylguanosine-3'-phosphate
  modified_base 5: mod_base = OTHER; note = 2'-O-methylguanosine-3'-phosphate
  modified_base 6: mod_base = OTHER; note = 2'-O-methyluridine-3'-phosphate
  modified_base 7: mod_base = OTHER; note = 2'-deoxy-2'-fluorocytidine-3'-phosphate
  modified_base 8: mod_base = OTHER; note = 2'-O-methyladenosine-3'-phosphate
  modified_base 9: mod_base = OTHER; note = 2'-deoxy-2'-fluoroguanosine-3'-phosphate
  modified_base 10: mod_base = OTHER; note = 2'-deoxy-2'-fluoroadenosine-3'-phosphate
  modified_base 11: mod_base = OTHER; note = 2'-deoxy-2'-fluoroadenosine-3'-phosphate
  modified_base 12: mod_base = OTHER; note = 2'-O-methylguanosine-3'-phosphate
  modified_base 13: mod_base = OTHER; note = 2'-O-methylguanosine-3'-phosphate
  modified_base 14: mod_base = OTHER; note = 2'-O-methylcytidine-3'-phosphate
  modified_base 15: mod_base = OTHER; note = 2'-O-methylcytidine-3'-phosphate
  modified_base 16: mod_base = OTHER; note = 2'-O-methyladenosine-3'-phosphate
  modified_base 17: mod_base = OTHER; note = 2'-O-methylguanosine-3'-phosphate
  modified_base 18: mod_base = OTHER; note = 2'-O-methylguanosine-3'-phosphate
  modified_base 19: mod_base = OTHER; note = 2'-O-methyladenosine-3'-phosphate
  modified_base 20: mod_base = OTHER; note = 2'-O-methylguanosine-3'-phosphate
  modified_base 21: mod_base = OTHER; note = 2'-O-methyluridine-3'-phosphate ((2S,4R)-1-[29-[[2-(acetylamino)-2-deoxy-beta-D-galactopyra nosyl]oxy]-14,14-bis[[3-[[3-[[5-[[2-(acetylamino)-2-deoxy-b eta-D-galactopyranosyl]oxy]-1-oxopentyl]amino]propyl]amino] -3-oxopropoxy]methyl]-1,12,19,25-tetraoxo-16-oxa-13,20,24-t riazanonacos-1-yl]-4-hydroxy-2-pyrrolidinyl)methyl ester
gtgggtcagaaggccaggagt

SEQ ID NO: 345 - RNA, 21 nt, synthetic construct
  source 1..21: mol_type = other RNA
  modified_base 1: mod_base = OTHER; note = 2'-O-methylguanosine-3'-phosphorothioate
  modified_base 2: mod_base = OTHER; note = 2'-O-methylguanosine-3'-phosphorothioate
  modified_base 3: mod_base = OTHER; note = 2'-O-methylcytidine-3'-phosphate
  modified_base 4: mod_base = OTHER; note = 2'-O-methylcytidine-3'-phosphate
  modified_base 5: mod_base = OTHER; note = 2'-O-methyladenosine-3'-phosphate
  modified_base 6: mod_base = OTHER; note = 2'-O-methylguanosine-3'-phosphate
  modified_base 7: mod_base = OTHER; note = 2'-deoxy-2'-fluoroguanosine-3'-phosphate
  modified_base 8: mod_base = OTHER; note = 2'-O-methyladenosine-3'-phosphate
  modified_base 9: mod_base = OTHER; note = 2'-deoxy-2'-fluoroguanosine-3'-phosphate
  modified_base 10: mod_base = OTHER; note = 2'-deoxy-2'-fluorocytidine-3'-phosphate
  modified_base 11: mod_base = OTHER; note = 2'-deoxy-2'-fluorocytidine-3'-phosphate
  modified_base 12: mod_base = OTHER; note = 2'-O-methyluridine-3'-phosphate
  modified_base 13: mod_base = OTHER; note = 2'-O-methylcytidine-3'-phosphate
  modified_base 14: mod_base = OTHER; note = 2'-O-methylcytidine-3'-phosphate
  modified_base 15: mod_base = OTHER; note = 2'-O-methyluridine-3'-phosphate
  modified_base 16: mod_base = OTHER; note = 2'-O-methyluridine-3'-phosphate
  modified_base 17: mod_base = OTHER; note = 2'-O-methylguanosine-3'-phosphate
  modified_base 18: mod_base = OTHER; note = 2'-O-methylguanosine-3'-phosphate
  modified_base 19: mod_base = OTHER; note = 2'-O-methyladenosine-3'-phosphate
  modified_base 20: mod_base = OTHER; note = 2'-O-methylguanosine-3'-phosphate
  modified_base 21: mod_base = OTHER; note = 2'-O-methyluridine-3'-phosphate ((2S,4R)-1-[29-[[2-(acetylamino)-2-deoxy-beta-D-galactopyra nosyl]oxy]-14,14-bis[[3-[[3-[[5-[[2-(acetylamino)-2-deoxy-b eta-D-galactopyranosyl]oxy]-1-oxopentyl]amino]propyl]amino] -3-oxopropoxy]methyl]-1,12,19,25-tetraoxo-16-oxa-13,20,24-t riazanonacos-1-yl]-4-hydroxy-2-pyrrolidinyl)methyl ester
ggccaggagcctccttggagt

SEQ ID NO: 346 - RNA, 21 nt, synthetic construct
  source 1..21: mol_type = other RNA
  modified_base 1: mod_base = OTHER; note = 2'-O-methylguanosine-3'-phosphorothioate
  modified_base 2: mod_base = OTHER; note = 2'-O-methylguanosine-3'-phosphorothioate
  modified_base 3: mod_base = OTHER; note = 2'-O-methyladenosine-3'-phosphate
  modified_base 4: mod_base = OTHER; note = 2'-O-methylguanosine-3'-phosphate
  modified_base 5: mod_base = OTHER; note = 2'-O-methylcytidine-3'-phosphate
  modified_base 6: mod_base = OTHER; note = 2'-O-methylcytidine-3'-phosphate
  modified_base 7: mod_base = OTHER; note = 2'-deoxy-2'-fluorouridine-3'-phosphate
  modified_base 8: mod_base = OTHER; note = 2'-O-methylcytidine-3'-phosphate
  modified_base 9: mod_base = OTHER; note = 2'-deoxy-2'-fluorocytidine-3'-phosphate
  modified_base 10: mod_base = OTHER; note = 2'-deoxy-2'-fluorouridine-3'-phosphate
  modified_base 11: mod_base = OTHER; note = 2'-deoxy-2'-fluorouridine-3'-phosphate
  modified_base 12: mod_base = OTHER; note = 2'-O-methylguanosine-3'-phosphate
  modified_base 13: mod_base = OTHER; note = 2'-O-methylguanosine-3'-phosphate
  modified_base 14: mod_base = OTHER; note = 2'-O-methyladenosine-3'-phosphate
  modified_base 15: mod_base = OTHER; note = 2'-O-methylguanosine-3'-phosphate
  modified_base 16: mod_base = OTHER; note = 2'-O-methylcytidine-3'-phosphate
  modified_base 17: mod_base = OTHER; note = 2'-O-methyluridine-3'-phosphate
  modified_base 18: mod_base = OTHER; note = 2'-O-methylguanosine-3'-phosphate
  modified_base 19: mod_base = OTHER; note = 2'-O-methyladenosine-3'-phosphate
  modified_base 20: mod_base = OTHER; note = 2'-O-methylguanosine-3'-phosphate
  modified_base 21: mod_base = OTHER; note = 2'-O-methyluridine-3'-phosphate ((2S,4R)-1-[29-[[2-(acetylamino)-2-deoxy-beta-D-galactopyra nosyl]oxy]-14,14-bis[[3-[[3-[[5-[[2-(acetylamino)-2-deoxy-b eta-D-galactopyranosyl]oxy]-1-oxopentyl]amino]propyl]amino] -3-oxopropoxy]methyl]-1,12,19,25-tetraoxo-16-oxa-13,20,24-t riazanonacos-1-yl]-4-hydroxy-2-pyrrolidinyl)methyl ester
ggagcctccttggagctgagt

SEQ ID NO: 347 - RNA, 21 nt, synthetic construct
  source 1..21: mol_type = other RNA
  modified_base 1: mod_base = OTHER; note = 2'-O-methylguanosine-3'-phosphorothioate
  modified_base 2: mod_base = OTHER; note = 2'-O-methyladenosine-3'-phosphorothioate
  modified_base 3: mod_base = OTHER; note = 2'-O-methylguanosine-3'-phosphate
  modified_base 4: mod_base = OTHER; note = 2'-O-methyladenosine-3'-phosphate
  modified_base 5: mod_base = OTHER; note = 2'-O-methylguanosine-3'-phosphate
  modified_base 6: mod_base = OTHER; note = 2'-O-methylguanosine-3'-phosphate
  modified_base 7: mod_base = OTHER; note = 2'-deoxy-2'-fluorocytidine-3'-phosphate
  modified_base 8: mod_base = OTHER; note = 2'-O-methyluridine-3'-phosphate
  modified_base 9: mod_base = OTHER; note = 2'-deoxy-2'-fluoroguanosine-3'-phosphate
  modified_base 10: mod_base = OTHER; note = 2'-deoxy-2'-fluoroguanosine-3'-phosphate
  modified_base 11: mod_base = OTHER; note = 2'-deoxy-2'-fluorocytidine-3'-phosphate
  modified_base 12: mod_base = OTHER; note = 2'-O-methyluridine-3'-phosphate
  modified_base 13: mod_base = OTHER; note = 2'-O-methylguanosine-3'-phosphate
  modified_base 14: mod_base = OTHER; note = 2'-O-methyladenosine-3'-phosphate
  modified_base 15: mod_base = OTHER; note = 2'-O-methyladenosine-3'-phosphate
  modified_base 16: mod_base = OTHER; note = 2'-O-methylguanosine-3'-phosphate
  modified_base 17: mod_base = OTHER; note = 2'-O-methylcytidine-3'-phosphate
  modified_base 18: mod_base = OTHER; note = 2'-O-methyluridine-3'-phosphate
  modified_base 19: mod_base = OTHER; note = 2'-O-methyladenosine-3'-phosphate
  modified_base 20: mod_base = OTHER; note = 2'-O-methyluridine-3'-phosphate
  modified_base 21: mod_base = OTHER; note = 2'-O-methyluridine-3'-phosphate ((2S,4R)-1-[29-[[2-(acetylamino)-2-deoxy-beta-D-galactopyra nosyl]oxy]-14,14-bis[[3-[[3-[[5-[[2-(acetylamino)-2-deoxy-b eta-D-galactopyranosyl]oxy]-1-oxopentyl]amino]propyl]amino] -3-oxopropoxy]methyl]-1,12,19,25-tetraoxo-16-oxa-13,20,24-t riazanonacos-1-yl]-4-hydroxy-2-pyrrolidinyl)methyl ester
gagaggctggctgaagctatt

SEQ ID NO: 348 - RNA, 21 nt, synthetic construct
  source 1..21: mol_type = other RNA
  modified_base 1: mod_base = OTHER; note = 2'-O-methylguanosine-3'-phosphorothioate
  modified_base 2: mod_base = OTHER; note = 2'-O-methylguanosine-3'-phosphorothioate
  modified_base 3: mod_base = OTHER; note = 2'-O-methylcytidine-3'-phosphate
  modified_base 4: mod_base = OTHER; note = 2'-O-methyluridine-3'-phosphate
  modified_base 5: mod_base = OTHER; note = 2'-O-methylguanosine-3'-phosphate
  modified_base 6: mod_base = OTHER; note = 2'-O-methyladenosine-3'-phosphate
  modified_base 7: mod_base = OTHER; note = 2'-deoxy-2'-fluoroadenosine-3'-phosphate
  modified_base 8: mod_base = OTHER; note = 2'-O-methylguanosine-3'-phosphate
  modified_base 9: mod_base = OTHER; note = 2'-deoxy-2'-fluorocytidine-3'-phosphate
  modified_base 10: mod_base = OTHER; note = 2'-deoxy-2'-fluorouridine-3'-phosphate
  modified_base 11: mod_base = OTHER; note = 2'-deoxy-2'-fluoroadenosine-3'-phosphate
  modified_base 12: mod_base = OTHER; note = 2'-O-methyluridine-3'-phosphate
  modified_base 13: mod_base = OTHER; note = 2'-O-methylguanosine-3'-phosphate
  modified_base 14: mod_base = OTHER; note = 2'-O-methylguanosine-3'-phosphate
  modified_base 15: mod_base = OTHER; note = 2'-O-methyladenosine-3'-phosphate
  modified_base 16: mod_base = OTHER; note = 2'-O-methylcytidine-3'-phosphate
  modified_base 17: mod_base = OTHER; note = 2'-O-methyluridine-3'-phosphate
  modified_base 18: mod_base = OTHER; note = 2'-O-methylcytidine-3'-phosphate
  modified_base 19: mod_base = OTHER; note = 2'-O-methyluridine-3'-phosphate
  modified_base 20: mod_base = OTHER; note = 2'-O-methylguanosine-3'-phosphate
  modified_base 21: mod_base = OTHER; note = 2'-O-methyluridine-3'-phosphate ((2S,4R)-1-[29-[[2-(acetylamino)-2-deoxy-beta-D-galactopyra nosyl]oxy]-14,14-bis[[3-[[3-[[5-[[2-(acetylamino)-2-deoxy-b eta-D-galactopyranosyl]oxy]-1-oxopentyl]amino]propyl]amino] -3-oxopropoxy]methyl]-1,12,19,25-tetraoxo-16-oxa-13,20,24-t riazanonacos-1-yl]-4-hydroxy-2-pyrrolidinyl)methyl ester
ggctgaagctatggactctgt

SEQ ID NO: 349 - RNA, 21 nt, synthetic construct
  source 1..21: mol_type = other RNA
  modified_base 1: mod_base = OTHER; note = 2'-O-methylguanosine-3'-phosphorothioate
  modified_base 2: mod_base = OTHER; note = 2'-O-methylcytidine-3'-phosphorothioate
  modified_base 3: mod_base = OTHER; note = 2'-O-methyluridine-3'-phosphate
  modified_base 4: mod_base = OTHER; note = 2'-O-methyladenosine-3'-phosphate
  modified_base 5: mod_base = OTHER; note = 2'-O-methyluridine-3'-phosphate
  modified_base 6: mod_base = OTHER; note = 2'-O-methylguanosine-3'-phosphate
  modified_base 7: mod_base = OTHER; note = 2'-deoxy-2'-fluoroguanosine-3'-phosphate
  modified_base 8: mod_base = OTHER; note = 2'-O-methyladenosine-3'-phosphate
  modified_base 9: mod_base = OTHER; note = 2'-deoxy-2'-fluorocytidine-3'-phosphate
  modified_base 10: mod_base = OTHER; note = 2'-deoxy-2'-fluorouridine-3'-phosphate
  modified_base 11: mod_base = OTHER; note = 2'-deoxy-2'-fluorocytidine-3'-phosphate
  modified_base 12: mod_base = OTHER; note = 2'-O-methyluridine-3'-phosphate
  modified_base 13: mod_base = OTHER; note = 2'-O-methylguanosine-3'-phosphate
  modified_base 14: mod_base = OTHER; note = 2'-O-methylguanosine-3'-phosphate
  modified_base 15: mod_base = OTHER; note = 2'-O-methylguanosine-3'-phosphate
  modified_base 16: mod_base = OTHER; note = 2'-O-methylcytidine-3'-phosphate
  modified_base 17: mod_base = OTHER; note = 2'-O-methyladenosine-3'-phosphate
  modified_base 18: mod_base = OTHER; note = 2'-O-methylguanosine-3'-phosphate
  modified_base 19: mod_base = OTHER; note = 2'-O-methyladenosine-3'-phosphate
  modified_base 20: mod_base = OTHER; note = 2'-O-methyladenosine-3'-phosphate
  modified_base 21: mod_base = OTHER; note = 2'-O-methyluridine-3'-phosphate ((2S,4R)-1-[29-[[2-(acetylamino)-2-deoxy-beta-D-galactopyra nosyl]oxy]-14,14-bis[[3-[[3-[[5-[[2-(acetylamino)-2-deoxy-b eta-D-galactopyranosyl]oxy]-1-oxopentyl]amino]propyl]amino] -3-oxopropoxy]methyl]-1,12,19,25-tetraoxo-16-oxa-13,20,24-t riazanonacos-1-yl]-4-hydroxy-2-pyrrolidinyl)methyl ester
gctatggactctgggcagaat

SEQ ID NO: 350 - RNA, 21 nt, synthetic construct
  source 1..21: mol_type = other RNA
  modified_base 1: mod_base = OTHER; note = 2'-O-methylcytidine-3'-phosphorothioate
  modified_base 2: mod_base = OTHER; note = 2'-O-methyluridine-3'-phosphorothioate
  modified_base 3: mod_base = OTHER; note = 2'-O-methylcytidine-3'-phosphate
  modified_base 4: mod_base = OTHER; note = 2'-O-methyluridine-3'-phosphate
  modified_base 5: mod_base = OTHER; note = 2'-O-methylguanosine-3'-phosphate
  modified_base 6: mod_base = OTHER; note = 2'-O-methylguanosine-3'-phosphate
  modified_base 7: mod_base = OTHER; note = 2'-deoxy-2'-fluoroguanosine-3'-phosphate
  modified_base 8: mod_base = OTHER; note = 2'-O-methylcytidine-3'-phosphate
  modified_base 9: mod_base = OTHER; note = 2'-deoxy-2'-fluoroadenosine-3'-phosphate
  modified_base 10: mod_base = OTHER; note = 2'-deoxy-2'-fluoroguanosine-3'-phosphate
  modified_base 11: mod_base = OTHER; note = 2'-deoxy-2'-fluoroadenosine-3'-phosphate
  modified_base 12: mod_base = OTHER; note = 2'-O-methyladenosine-3'-phosphate
  modified_base 13: mod_base = OTHER; note = 2'-O-methylcytidine-3'-phosphate
  modified_base 14: mod_base = OTHER; note = 2'-O-methylcytidine-3'-phosphate
  modified_base 15: mod_base = OTHER; note = 2'-O-methyluridine-3'-phosphate
  modified_base 16: mod_base = OTHER; note = 2'-O-methylcytidine-3'-phosphate
  modified_base 17: mod_base = OTHER; note = 2'-O-methylcytidine-3'-phosphate
  modified_base 18: mod_base = OTHER; note = 2'-O-methyladenosine-3'-phosphate
  modified_base 19: mod_base = OTHER; note = 2'-O-methylguanosine-3'-phosphate
  modified_base 20: mod_base = OTHER; note = 2'-O-methylguanosine-3'-phosphate
  modified_base 21: mod_base = OTHER; note = 2'-O-methyluridine-3'-phosphate ((2S,4R)-1-[29-[[2-(acetylamino)-2-deoxy-beta-D-galactopyra nosyl]oxy]-14,14-bis[[3-[[3-[[5-[[2-(acetylamino)-2-deoxy-b eta-D-galactopyranosyl]oxy]-1-oxopentyl]amino]propyl]amino] -3-oxopropoxy]methyl]-1,12,19,25-tetraoxo-16-oxa-13,20,24-t riazanonacos-1-yl]-4-hydroxy-2-pyrrolidinyl)methyl ester
ctctgggcagaacctccaggt

SEQ ID NO: 351 - RNA, 21 nt, synthetic construct
  source 1..21: mol_type = other RNA
  modified_base 1: mod_base = OTHER; note = 2'-O-methylguanosine-3'-phosphorothioate
  modified_base 2: mod_base = OTHER; note = 2'-O-methyladenosine-3'-phosphorothioate
  modified_base 3: mod_base = OTHER; note = 2'-O-methyladenosine-3'-phosphate
  modified_base 4: mod_base = OTHER; note = 2'-O-methylcytidine-3'-phosphate
  modified_base 5: mod_base = OTHER; note = 2'-O-methylcytidine-3'-phosphate
  modified_base 6: mod_base = OTHER; note = 2'-O-methyluridine-3'-phosphate
  modified_base 7: mod_base = OTHER; note = 2'-deoxy-2'-fluorocytidine-3'-phosphate
  modified_base 8: mod_base = OTHER; note = 2'-O-methylcytidine-3'-phosphate
  modified_base 9: mod_base = OTHER; note = 2'-deoxy-2'-fluoroadenosine-3'-phosphate
  modified_base 10: mod_base = OTHER; note = 2'-deoxy-2'-fluoroguanosine-3'-phosphate
  modified_base 11: mod_base = OTHER; note = 2'-deoxy-2'-fluoroguanosine-3'-phosphate
  modified_base 12: mod_base = OTHER; note = 2'-O-methyluridine-3'-phosphate
  modified_base 13: mod_base = OTHER; note = 2'-O-methylcytidine-3'-phosphate
  modified_base 14: mod_base = OTHER; note = 2'-O-methyluridine-3'-phosphate
  modified_base 15: mod_base = OTHER; note = 2'-O-methylcytidine-3'-phosphate
  modified_base 16: mod_base = OTHER; note = 2'-O-methylcytidine-3'-phosphate
  modified_base 17: mod_base = OTHER; note = 2'-O-methyluridine-3'-phosphate
  modified_base 18: mod_base = OTHER; note = 2'-O-methylguanosine-3'-phosphate
  modified_base 19: mod_base = OTHER; note = 2'-O-methylcytidine-3'-phosphate
  modified_base 20: mod_base = OTHER; note = 2'-O-methylcytidine-3'-phosphate
  modified_base 21: mod_base = OTHER; note = 2'-O-methyluridine-3'-phosphate ((2S,4R)-1-[29-[[2-(acetylamino)-2-deoxy-beta-D-galactopyra nosyl]oxy]-14,14-bis[[3-[[3-[[5-[[2-(acetylamino)-2-deoxy-b eta-D-galactopyranosyl]oxy]-1-oxopentyl]amino]propyl]amino] -3-oxopropoxy]methyl]-1,12,19,25-tetraoxo-16-oxa-13,20,24-t riazanonacos-1-yl]-4-hydroxy-2-pyrrolidinyl)methyl ester
gaacctccaggtctcctgcct

SEQ ID NO: 352 - RNA, 21 nt, synthetic construct
  source 1..21: mol_type = other RNA
  modified_base 1: mod_base = OTHER; note = 2'-O-methyluridine-3'-phosphorothioate
  modified_base 2: mod_base = OTHER; note = 2'-O-methylcytidine-3'-phosphorothioate
  modified_base 3: mod_base = OTHER; note = 2'-O-methylcytidine-3'-phosphate
  modified_base 4: mod_base = OTHER; note = 2'-O-methyladenosine-3'-phosphate
  modified_base 5: mod_base = OTHER; note = 2'-O-methylguanosine-3'-phosphate
  modified_base 6: mod_base = OTHER; note = 2'-O-methylguanosine-3'-phosphate
  modified_base 7: mod_base = OTHER; note = 2'-deoxy-2'-fluorouridine-3'-phosphate
  modified_base 8: mod_base = OTHER; note = 2'-O-methylcytidine-3'-phosphate
  modified_base 9: mod_base = OTHER; note = 2'-deoxy-2'-fluorouridine-3'-phosphate
  modified_base 10: mod_base = OTHER; note = 2'-deoxy-2'-fluorocytidine-3'-phosphate
  modified_base 11: mod_base = OTHER; note = 2'-deoxy-2'-fluorocytidine-3'-phosphate
  modified_base 12: mod_base = OTHER; note = 2'-O-methyluridine-3'-phosphate
  modified_base 13: mod_base = OTHER; note = 2'-O-methylguanosine-3'-phosphate
  modified_base 14: mod_base = OTHER; note = 2'-O-methylcytidine-3'-phosphate
  modified_base 15: mod_base = OTHER; note = 2'-O-methylcytidine-3'-phosphate
  modified_base 16: mod_base = OTHER; note = 2'-O-methyluridine-3'-phosphate
  modified_base 17: mod_base = OTHER; note = 2'-O-methylcytidine-3'-phosphate
  modified_base 18: mod_base = OTHER; note = 2'-O-methyladenosine-3'-phosphate
  modified_base 19: mod_base = OTHER; note = 2'-O-methyladenosine-3'-phosphate
  modified_base 20: mod_base = OTHER; note = 2'-O-methyluridine-3'-phosphate
  modified_base 21: mod_base = OTHER; note = 2'-O-methyluridine-3'-phosphate ((2S,4R)-1-[29-[[2-(acetylamino)-2-deoxy-beta-D-galactopyra nosyl]oxy]-14,14-bis[[3-[[3-[[5-[[2-(acetylamino)-2-deoxy-b eta-D-galactopyranosyl]oxy]-1-oxopentyl]amino]propyl]amino] -3-oxopropoxy]methyl]-1,12,19,25-tetraoxo-16-oxa-13,20,24-t riazanonacos-1-yl]-4-hydroxy-2-pyrrolidinyl)methyl ester
tccaggtctcctgcctcaatt

SEQ ID NO: 353 - RNA, 21 nt, synthetic construct
  source 1..21: mol_type = other RNA
  modified_base 1: mod_base = OTHER; note = 2'-O-methyluridine-3'-phosphorothioate
  modified_base 2: mod_base = OTHER; note = 2'-O-methylcytidine-3'-phosphorothioate
  modified_base 3: mod_base = OTHER; note = 2'-O-methylcytidine-3'-phosphate
  modified_base 4: mod_base = OTHER; note = 2'-O-methyluridine-3'-phosphate
  modified_base 5: mod_base = OTHER; note = 2'-O-methylguanosine-3'-phosphate
  modified_base 6: mod_base = OTHER; note = 2'-O-methylcytidine-3'-phosphate
  modified_base 7: mod_base = OTHER; note = 2'-deoxy-2'-fluorocytidine-3'-phosphate
  modified_base 8: mod_base = OTHER; note = 2'-O-methyluridine-3'-phosphate
  modified_base 9: mod_base = OTHER; note = 2'-deoxy-2'-fluorocytidine-3'-phosphate
  modified_base 10: mod_base = OTHER; note = 2'-deoxy-2'-fluoroadenosine-3'-phosphate
  modified_base 11: mod_base = OTHER; note = 2'-deoxy-2'-fluoroadenosine-3'-phosphate
  modified_base 12: mod_base = OTHER; note = 2'-O-methyluridine-3'-phosphate
  modified_base 13: mod_base = OTHER; note = 2'-O-methylguanosine-3'-phosphate
  modified_base 14: mod_base = OTHER; note = 2'-O-methylcytidine-3'-phosphate
  modified_base 15: mod_base = OTHER; note = 2'-O-methyluridine-3'-phosphate
  modified_base 16: mod_base = OTHER; note = 2'-O-methylguanosine-3'-phosphate
  modified_base 17: mod_base = OTHER; note = 2'-O-methyladenosine-3'-phosphate
  modified_base 18: mod_base = OTHER; note = 2'-O-methylguanosine-3'-phosphate
  modified_base 19: mod_base = OTHER; note = 2'-O-methylcytidine-3'-phosphate
  modified_base 20: mod_base = OTHER; note = 2'-O-methyladenosine-3'-phosphate
  modified_base 21: mod_base = OTHER; note = 2'-O-methyluridine-3'-phosphate ((2S,4R)-1-[29-[[2-(acetylamino)-2-deoxy-beta-D-galactopyra nosyl]oxy]-14,14-bis[[3-[[3-[[5-[[2-(acetylamino)-2-deoxy-b eta-D-galactopyranosyl]oxy]-1-oxopentyl]amino]propyl]amino] -3-oxopropoxy]methyl]-1,12,19,25-tetraoxo-16-oxa-13,20,24-t riazanonacos-1-yl]-4-hydroxy-2-pyrrolidinyl)methyl ester
tcctgcctcaatgctgagcat

SEQ ID NO: 354 - RNA, 21 nt, synthetic construct
  source 1..21: mol_type = other RNA
  modified_base 1: mod_base = OTHER; note = 2'-O-methyluridine-3'-phosphorothioate
  modified_base 2: mod_base = OTHER; note = 2'-O-methylcytidine-3'-phosphorothioate
  modified_base 3: mod_base = OTHER; note = 2'-O-methyladenosine-3'-phosphate
  modified_base 4: mod_base = OTHER; note = 2'-O-methyladenosine-3'-phosphate
  modified_base 5: mod_base = OTHER; note = 2'-O-methyluridine-3'-phosphate
  modified_base 6: mod_base = OTHER; note = 2'-O-methylguanosine-3'-phosphate
  modified_base 7: mod_base = OTHER; note = 2'-deoxy-2'-fluorocytidine-3'-phosphate
  modified_base 8: mod_base = OTHER; note = 2'-O-methyluridine-3'-phosphate
  modified_base 9: mod_base = OTHER; note = 2'-deoxy-2'-fluoroguanosine-3'-phosphate
  modified_base 10: mod_base = OTHER; note = 2'-deoxy-2'-fluoroadenosine-3'-phosphate
  modified_base 11: mod_base = OTHER; note = 2'-deoxy-2'-fluoroguanosine-3'-phosphate
  modified_base 12: mod_base = OTHER; note = 2'-O-methylcytidine-3'-phosphate
  modified_base 13: mod_base = OTHER; note = 2'-O-methyladenosine-3'-phosphate
  modified_base 14: mod_base = OTHER; note = 2'-O-methylguanosine-3'-phosphate
  modified_base 15: mod_base = OTHER; note = 2'-O-methyladenosine-3'-phosphate
  modified_base 16: mod_base = OTHER; note = 2'-O-methyladenosine-3'-phosphate
  modified_base 17: mod_base = OTHER; note = 2'-O-methylcytidine-3'-phosphate
  modified_base 18: mod_base = OTHER; note = 2'-O-methylcytidine-3'-phosphate
  modified_base 19: mod_base = OTHER; note = 2'-O-methyladenosine-3'-phosphate
  modified_base 20: mod_base = OTHER; note = 2'-O-methylguanosine-3'-phosphate
  modified_base 21: mod_base = OTHER; note = 2'-O-methyluridine-3'-phosphate ((2S,4R)-1-[29-[[2-(acetylamino)-2-deoxy-beta-D-galactopyra nosyl]oxy]-14,14-bis[[3-[[3-[[5-[[2-(acetylamino)-2-deoxy-b eta-D-galactopyranosyl]oxy]-1-oxopentyl]amino]propyl]amino] -3-oxopropoxy]methyl]-1,12,19,25-tetraoxo-16-oxa-13,20,24-t riazanonacos-1-yl]-4-hydroxy-2-pyrrolidinyl)methyl ester
tcaatgctgagcagaaccagt

SEQ ID NO: 355 - RNA, 21 nt, synthetic construct
  source 1..21: mol_type = other RNA
  modified_base 1: mod_base = OTHER; note = 2'-O-methylguanosine-3'-phosphorothioate
  modified_base 2: mod_base = OTHER; note = 2'-O-methylcytidine-3'-phosphorothioate
  modified_base 3: mod_base = OTHER; note = 2'-O-methyluridine-3'-phosphate
  modified_base 4: mod_base = OTHER; note = 2'-O-methylguanosine-3'-phosphate
  modified_base 5: mod_base = OTHER; note = 2'-O-methyladenosine-3'-phosphate
  modified_base 6: mod_base = OTHER; note = 2'-O-methylguanosine-3'-phosphate
  modified_base 7: mod_base = OTHER; note = 2'-deoxy-2'-fluorocytidine-3'-phosphate
  modified_base 8: mod_base = OTHER; note = 2'-O-methyladenosine-3'-phosphate
  modified_base 9: mod_base = OTHER; note = 2'-deoxy-2'-fluoroguanosine-3'-phosphate
  modified_base 10: mod_base = OTHER; note = 2'-deoxy-2'-fluoroadenosine-3'-phosphate
  modified_base 11: mod_base = OTHER; note = 2'-deoxy-2'-fluoroadenosine-3'-phosphate
  modified_base 12: mod_base = OTHER; note = 2'-O-methylcytidine-3'-phosphate
  modified_base 13: mod_base = OTHER; note = 2'-O-methylcytidine-3'-phosphate
  modified_base 14: mod_base = OTHER; note = 2'-O-methyladenosine-3'-phosphate
  modified_base 15: mod_base = OTHER; note = 2'-O-methylguanosine-3'-phosphate
  modified_base 16: mod_base = OTHER; note = 2'-O-methylcytidine-3'-phosphate
  modified_base 17: mod_base = OTHER; note = 2'-O-methyladenosine-3'-phosphate
  modified_base 18: mod_base = OTHER; note = 2'-O-methylcytidine-3'-phosphate
  modified_base 19: mod_base = OTHER; note = 2'-O-methylcytidine-3'-phosphate
  modified_base 20: mod_base = OTHER; note = 2'-O-methyluridine-3'-phosphate
  modified_base 21: mod_base = OTHER; note = 2'-O-methyluridine-3'-phosphate ((2S,4R)-1-[29-[[2-(acetylamino)-2-deoxy-beta-D-galactopyra nosyl]oxy]-14,14-bis[[3-[[3-[[5-[[2-(acetylamino)-2-deoxy-b eta-D-galactopyranosyl]oxy]-1-oxopentyl]amino]propyl]amino] -3-oxopropoxy]methyl]-1,12,19,25-tetraoxo-16-oxa-13,20,24-t riazanonacos-1-yl]-4-hydroxy-2-pyrrolidinyl)methyl ester
gctgagcagaaccagcacctt

SEQ ID NO: 356 - RNA, 21 nt, synthetic construct
  source 1..21: mol_type = other RNA
  modified_base 1: mod_base = OTHER; note = 2'-O-methylguanosine-3'-phosphorothioate
  modified_base 2: mod_base = OTHER; note = 2'-O-methylcytidine-3'-phosphorothioate
  modified_base 3: mod_base = OTHER; note = 2'-O-methyladenosine-3'-phosphate
  modified_base 4: mod_base = OTHER; note = 2'-O-methyluridine-3'-phosphate
  modified_base 5: mod_base = OTHER; note = 2'-O-methylcytidine-3'-phosphate
  modified_base 6: mod_base = OTHER; note = 2'-O-methylguanosine-3'-phosphate
  modified_base 7: mod_base = OTHER; note = 2'-deoxy-2'-fluoroguanosine-3'-phosphate
  modified_base 8: mod_base = OTHER; note = 2'-O-methylguanosine-3'-phosphate
  modified_base 9: mod_base = OTHER; note = 2'-deoxy-2'-fluorouridine-3'-phosphate
  modified_base 10: mod_base = OTHER; note = 2'-deoxy-2'-fluoroguanosine-3'-phosphate
  modified_base 11: mod_base = OTHER; note = 2'-deoxy-2'-fluoroguanosine-3'-phosphate
  modified_base 12: mod_base = OTHER; note = 2'-O-methylcytidine-3'-phosphate
  modified_base 13: mod_base = OTHER; note = 2'-O-methyladenosine-3'-phosphate
  modified_base 14: mod_base = OTHER; note = 2'-O-methylcytidine-3'-phosphate
  modified_base 15: mod_base = OTHER; note = 2'-O-methyladenosine-3'-phosphate
  modified_base 16: mod_base = OTHER; note = 2'-O-methylguanosine-3'-phosphate
  modified_base 17: mod_base = OTHER; note = 2'-O-methyluridine-3'-phosphate
  modified_base 18: mod_base = OTHER; note = 2'-O-methyladenosine-3'-phosphate
  modified_base 19: mod_base = OTHER; note = 2'-O-methyluridine-3'-phosphate
  modified_base 20: mod_base = OTHER; note = 2'-O-methylguanosine-3'-phosphate
  modified_base 21: mod_base = OTHER; note = 2'-O-methyluridine-3'-phosphate ((2S,4R)-1-[29-[[2-(acetylamino)-2-deoxy-beta-D-galactopyra nosyl]oxy]-14,14-bis[[3-[[3-[[5-[[2-(acetylamino)-2-deoxy-b eta-D-galactopyranosyl]oxy]-1-oxopentyl]amino]propyl]amino] -3-oxopropoxy]methyl]-1,12,19,25-tetraoxo-16-oxa-13,20,24-t riazanonacos-1-yl]-4-hydroxy-2-pyrrolidinyl)methyl ester
gcatcgggtggcacagtatgt

SEQ ID NO: 357 - RNA, 21 nt, synthetic construct
  source 1..21: mol_type = other RNA
  modified_base 1: mod_base = OTHER; note = 2'-O-methylcytidine-3'-phosphorothioate
  modified_base 2: mod_base = OTHER; note = 2'-O-methyluridine-3'-phosphorothioate
  modified_base 3: mod_base = OTHER; note = 2'-O-methylcytidine-3'-phosphate
  modified_base 4: mod_base = OTHER; note = 2'-O-methylcytidine-3'-phosphate
  modified_base 5: mod_base = OTHER; note = 2'-O-methyluridine-3'-phosphate
  modified_base 6: mod_base = OTHER; note = 2'-O-methylguanosine-3'-phosphate
  modified_base 7: mod_base = OTHER; note = 2'-deoxy-2'-fluoroguanosine-3'-phosphate
  modified_base 8: mod_base = OTHER; note = 2'-O-methyluridine-3'-phosphate
  modified_base 9: mod_base = OTHER; note = 2'-deoxy-2'-fluoroguanosine-3'-phosphate
  modified_base 10: mod_base = OTHER; note = 2'-deoxy-2'-fluoroguanosine-3'-phosphate
  modified_base 11: mod_base = OTHER; note = 2'-deoxy-2'-fluoroadenosine-3'-phosphate
  modified_base 12: mod_base = OTHER; note = 2'-O-methyluridine-3'-phosphate
  modified_base 13: mod_base = OTHER; note = 2'-O-methylguanosine-3'-phosphate
  modified_base 14: mod_base = OTHER; note = 2'-O-methylcytidine-3'-phosphate
  modified_base 15: mod_base = OTHER; note = 2'-O-methylguanosine-3'-phosphate
  modified_base 16: mod_base = OTHER; note = 2'-O-methylguanosine-3'-phosphate
  modified_base 17: mod_base = OTHER; note = 2'-O-methyladenosine-3'-phosphate
  modified_base 18: mod_base = OTHER; note = 2'-O-methylguanosine-3'-phosphate
  modified_base 19: mod_base = OTHER; note = 2'-O-methyluridine-3'-phosphate
  modified_base 20: mod_base = OTHER; note = 2'-O-methyladenosine-3'-phosphate
  modified_base 21: mod_base = OTHER; note = 2'-O-methyluridine-3'-phosphate ((2S,4R)-1-[29-[[2-(acetylamino)-2-deoxy-beta-D-galactopyra nosyl]oxy]-14,14-bis[[3-[[3-[[5-[[2-(acetylamino)-2-deoxy-b eta-D-galactopyranosyl]oxy]-1-oxopentyl]amino]propyl]amino] -3-oxopropoxy]methyl]-1,12,19,25-tetraoxo-16-oxa-13,20,24-t riazanonacos-1-yl]-4-hydroxy-2-pyrrolidinyl)methyl ester
ctcctggtggatgcggagtat

SEQ ID NO: 358 - RNA, 21 nt, synthetic construct
  source 1..21: mol_type = other RNA
  modified_base 1: mod_base = OTHER; note = 2'-O-methyluridine-3'-phosphorothioate
  modified_base 2: mod_base = OTHER; note = 2'-O-methylguanosine-3'-phosphorothioate
  modified_base 3: mod_base = OTHER; note = 2'-O-methylguanosine-3'-phosphate
  modified_base 4: mod_base = OTHER; note = 2'-O-methyladenosine-3'-phosphate
  modified_base 5: mod_base = OTHER; note = 2'-O-methyluridine-3'-phosphate
  modified_base 6: mod_base = OTHER; note = 2'-O-methylguanosine-3'-phosphate
  modified_base 7: mod_base = OTHER; note = 2'-deoxy-2'-fluorocytidine-3'-phosphate
  modified_base 8: mod_base = OTHER; note = 2'-O-methylguanosine-3'-phosphate
  modified_base 9: mod_base = OTHER; note = 2'-deoxy-2'-fluoroguanosine-3'-phosphate
  modified_base 10: mod_base = OTHER; note = 2'-deoxy-2'-fluoroadenosine-3'-phosphate
  modified_base 11: mod_base = OTHER; note = 2'-deoxy-2'-fluoroguanosine-3'-phosphate
  modified_base 12: mod_base = OTHER; note = 2'-O-methyluridine-3'-phosphate
  modified_base 13: mod_base = OTHER; note = 2'-O-methyladenosine-3'-phosphate
  modified_base 14: mod_base = OTHER; note = 2'-O-methylcytidine-3'-phosphate
  modified_base 15: mod_base = OTHER; note = 2'-O-methyladenosine-3'-phosphate
  modified_base 16: mod_base = OTHER; note = 2'-O-methylcytidine-3'-phosphate
  modified_base 17: mod_base = OTHER; note = 2'-O-methylcytidine-3'-phosphate
  modified_base 18: mod_base = OTHER; note = 2'-O-methyluridine-3'-phosphate
  modified_base 19: mod_base = OTHER; note = 2'-O-methylcytidine-3'-phosphate
  modified_base 20: mod_base = OTHER; note = 2'-O-methyladenosine-3'-phosphate
  modified_base 21: mod_base = OTHER; note = 2'-O-methyluridine-3'-phosphate ((2S,4R)-1-[29-[[2-(acetylamino)-2-deoxy-beta-D-galactopyra nosyl]oxy]-14,14-bis[[3-[[3-[[5-[[2-(acetylamino)-2-deoxy-b eta-D-galactopyranosyl]oxy]-1-oxopentyl]amino]propyl]amino] -3-oxopropoxy]methyl]-1,12,19,25-tetraoxo-16-oxa-13,20,24-t riazanonacos-1-yl]-4-hydroxy-2-pyrrolidinyl)methyl ester
tggatgcggagtacacctcat

SEQ ID NO: 359 - RNA, 21 nt, synthetic construct
  source 1..21: mol_type = other RNA
  modified_base 1: mod_base = OTHER; note = 2'-O-methylguanosine-3'-phosphorothioate
  modified_base 2: mod_base = OTHER; note = 2'-O-methylcytidine-3'-phosphorothioate
  modified_base 3: mod_base = OTHER; note = 2'-O-methylguanosine-3'-phosphate
  modified_base 4: mod_base = OTHER; note = 2'-O-methylguanosine-3'-phosphate
  modified_base 5: mod_base = OTHER; note = 2'-O-methyladenosine-3'-phosphate
  modified_base 6: mod_base = OTHER; note = 2'-O-methylguanosine-3'-phosphate
  modified_base 7: mod_base = OTHER; note = 2'-deoxy-2'-fluorouridine-3'-phosphate
  modified_base 8: mod_base = OTHER; note = 2'-O-methyladenosine-3'-phosphate
  modified_base 9: mod_base = OTHER; note = 2'-deoxy-2'-fluorocytidine-3'-phosphate
  modified_base 10: mod_base = OTHER; note = 2'-deoxy-2'-fluoroadenosine-3'-phosphate
  modified_base 11: mod_base = OTHER; note = 2'-deoxy-2'-fluorocytidine-3'-phosphate
  modified_base 12: mod_base = OTHER; note = 2'-O-methylcytidine-3'-phosphate
  modified_base 13: mod_base = OTHER; note = 2'-O-methyluridine-3'-phosphate
  modified_base 14: mod_base = OTHER; note = 2'-O-methylcytidine-3'-phosphate
  modified_base 15: mod_base = OTHER; note = 2'-O-methyladenosine-3'-phosphate
  modified_base 16: mod_base = OTHER; note = 2'-O-methylcytidine-3'-phosphate
  modified_base 17: mod_base = OTHER; note = 2'-O-methyluridine-3'-phosphate
  modified_base 18: mod_base = OTHER; note = 2'-O-methylguanosine-3'-phosphate
  modified_base 19: mod_base = OTHER; note = 2'-O-methyladenosine-3'-phosphate
  modified_base 20: mod_base = OTHER; note = 2'-O-methyladenosine-3'-phosphate
  modified_base 21: mod_base = OTHER; note = 2'-O-methyluridine-3'-phosphate ((2S,4R)-1-[29-[[2-(acetylamino)-2-deoxy-beta-D-galactopyra nosyl]oxy]-14,14-bis[[3-[[3-[[5-[[2-(acetylamino)-2-deoxy-b eta-D-galactopyranosyl]oxy]-1-oxopentyl]amino]propyl]amino] -3-oxopropoxy]methyl]-1,12,19,25-tetraoxo-16-oxa-13,20,24-t riazanonacos-1-yl]-4-hydroxy-2-pyrrolidinyl)methyl ester
gcggagtacacctcactgaat

SEQ ID NO: 360 - RNA, 21 nt, synthetic construct
  source 1..21: mol_type = other RNA
  modified_base 1: mod_base = OTHER; note = 2'-O-methylguanosine-3'-phosphorothioate
  modified_base 2: mod_base = OTHER; note = 2'-O-methyluridine-3'-phosphorothioate
  modified_base 3: mod_base = OTHER; note = 2'-O-methyladenosine-3'-phosphate
  modified_base 4: mod_base = OTHER; note = 2'-O-methylcytidine-3'-phosphate
  modified_base 5: mod_base = OTHER; note = 2'-O-methyladenosine-3'-phosphate
  modified_base 6: mod_base = OTHER; note = 2'-O-methylcytidine-3'-phosphate
  modified_base 7: mod_base = OTHER; note = 2'-deoxy-2'-fluorocytidine-3'-phosphate
  modified_base 8: mod_base = OTHER; note = 2'-O-methyluridine-3'-phosphate
  modified_base 9: mod_base = OTHER; note = 2'-deoxy-2'-fluorocytidine-3'-phosphate
  modified_base 10: mod_base = OTHER; note = 2'-deoxy-2'-fluoroadenosine-3'-phosphate
  modified_base 11: mod_base = OTHER; note = 2'-deoxy-2'-fluorocytidine-3'-phosphate
  modified_base 12: mod_base = OTHER; note = 2'-O-methyluridine-3'-phosphate
  modified_base 13: mod_base = OTHER; note = 2'-O-methylguanosine-3'-phosphate
  modified_base 14: mod_base = OTHER; note = 2'-O-methyladenosine-3'-phosphate
  modified_base 15: mod_base = OTHER; note = 2'-O-methyladenosine-3'-phosphate
  modified_base 16: mod_base = OTHER; note = 2'-O-methylcytidine-3'-phosphate
  modified_base 17: mod_base = OTHER; note = 2'-O-methylcytidine-3'-phosphate
  modified_base 18: mod_base = OTHER; note = 2'-O-methylcytidine-3'-phosphate
  modified_base 19: mod_base = OTHER; note = 2'-O-methyluridine-3'-phosphate
  modified_base 20: mod_base = OTHER; note = 2'-O-methylguanosine-3'-phosphate
  modified_base 21: mod_base = OTHER; note = 2'-O-methyluridine-3'-phosphate ((2S,4R)-1-[29-[[2-(acetylamino)-2-deoxy-beta-D-galactopyra nosyl]oxy]-14,14-bis[[3-[[3-[[5-[[2-(acetylamino)-2-deoxy-b eta-D-galactopyranosyl]oxy]-1-oxopentyl]amino]propyl]amino] -3-oxopropoxy]methyl]-1,12,19,25-tetraoxo-16-oxa-13,20,24-t riazanonacos-1-yl]-4-hydroxy-2-pyrrolidinyl)methyl ester
gtacacctcactgaaccctgt

SEQ ID NO: 361 - RNA, 21 nt, synthetic construct
  source 1..21: mol_type = other RNA
  modified_base 1: mod_base = OTHER; note = 2'-O-methyluridine-3'-phosphorothioate
  modified_base 2: mod_base = OTHER; note = 2'-O-methylcytidine-3'-phosphorothioate
  modified_base 3: mod_base = OTHER; note = 2'-O-methyladenosine-3'-phosphate
  modified_base 4: mod_base = OTHER; note = 2'-O-methylcytidine-3'-phosphate
  modified_base 5: mod_base = OTHER; note = 2'-O-methyluridine-3'-phosphate
  modified_base 6: mod_base = OTHER; note = 2'-O-methylguanosine-3'-phosphate
  modified_base 7: mod_base = OTHER; note = 2'-deoxy-2'-fluoroadenosine-3'-phosphate
  modified_base 8: mod_base = OTHER; note = 2'-O-methyladenosine-3'-phosphate
  modified_base 9: mod_base = OTHER; note = 2'-deoxy-2'-fluorocytidine-3'-phosphate
  modified_base 10: mod_base = OTHER; note = 2'-deoxy-2'-fluorocytidine-3'-phosphate
  modified_base 11: mod_base = OTHER; note = 2'-deoxy-2'-fluorocytidine-3'-phosphate
  modified_base 12: mod_base = OTHER; note = 2'-O-methyluridine-3'-phosphate
  modified_base 13: mod_base = OTHER; note = 2'-O-methylguanosine-3'-phosphate
  modified_base 14: mod_base = OTHER; note = 2'-O-methylcytidine-3'-phosphate
  modified_base 15: mod_base = OTHER; note = 2'-O-methylguanosine-3'-phosphate
  modified_base 16: mod_base = OTHER; note = 2'-O-methylcytidine-3'-phosphate
  modified_base 17: mod_base = OTHER; note = 2'-O-methyluridine-3'-phosphate
  modified_base 18: mod_base = OTHER; note = 2'-O-methylcytidine-3'-phosphate
  modified_base 19: mod_base = OTHER; note = 2'-O-methyluridine-3'-phosphate
  modified_base 20: mod_base = OTHER; note = 2'-O-methylcytidine-3'-phosphate
  modified_base 21: mod_base = OTHER; note = 2'-O-methyluridine-3'-phosphate ((2S,4R)-1-[29-[[2-(acetylamino)-2-deoxy-beta-D-galactopyra nosyl]oxy]-14,14-bis[[3-[[3-[[5-[[2-(acetylamino)-2-deoxy-b eta-D-galactopyranosyl]oxy]-1-oxopentyl]amino]propyl]amino] -3-oxopropoxy]methyl]-1,12,19,25-tetraoxo-16-oxa-13,20,24-t riazanonacos-1-yl]-4-hydroxy-2-pyrrolidinyl)methyl ester
tcactgaaccctgcgctctct

SEQ ID NO: 362 - RNA, 21 nt, synthetic construct
  source 1..21: mol_type = other RNA
  modified_base 1: mod_base = OTHER; note = 2'-O-methyladenosine-3'-phosphorothioate
  modified_base 2: mod_base = OTHER; note = 2'-O-methyladenosine-3'-phosphorothioate
  modified_base 3: mod_base = OTHER; note = 2'-O-methylcytidine-3'-phosphate
  modified_base 4: mod_base = OTHER; note = 2'-O-methylcytidine-3'-phosphate
  modified_base 5: mod_base = OTHER; note = 2'-O-methylcytidine-3'-phosphate
  modified_base 6: mod_base = OTHER; note = 2'-O-methyluridine-3'-phosphate
  modified_base 7: mod_base = OTHER; note = 2'-deoxy-2'-fluoroguanosine-3'-phosphate
  modified_base 8: mod_base = OTHER; note = 2'-O-methylcytidine-3'-phosphate
  modified_base 9: mod_base = OTHER; note = 2'-deoxy-2'-fluoroguanosine-3'-phosphate
  modified_base 10: mod_base = OTHER; note = 2'-deoxy-2'-fluorocytidine-3'-phosphate
  modified_base 11: mod_base = OTHER; note = 2'-deoxy-2'-fluorouridine-3'-phosphate
  modified_base 12: mod_base = OTHER; note = 2'-O-methylcytidine-3'-phosphate
  modified_base 13: mod_base = OTHER; note = 2'-O-methyluridine-3'-phosphate
  modified_base 14: mod_base = OTHER; note = 2'-O-methylcytidine-3'-phosphate
  modified_base 15: mod_base = OTHER; note = 2'-O-methylguanosine-3'-phosphate
  modified_base 16: mod_base = OTHER; note = 2'-O-methylcytidine-3'-phosphate
  modified_base 17: mod_base = OTHER; note = 2'-O-methyluridine-3'-phosphate
  modified_base 18: mod_base = OTHER; note = 2'-O-methylguanosine-3'-phosphate
  modified_base 19: mod_base = OTHER; note = 2'-O-methylcytidine-3'-phosphate
  modified_base 20: mod_base = OTHER; note = 2'-O-methyluridine-3'-phosphate
  modified_base 21: mod_base = OTHER; note = 2'-O-methyluridine-3'-phosphate ((2S,4R)-1-[29-[[2-(acetylamino)-2-deoxy-beta-D-galactopyra nosyl]oxy]-14,14-bis[[3-[[3-[[5-[[2-(acetylamino)-2-deoxy-b eta-D-galactopyranosyl]oxy]-1-oxopentyl]amino]propyl]amino] -3-oxopropoxy]methyl]-1,12,19,25-tetraoxo-16-oxa-13,20,24-t riazanonacos-1-yl]-4-hydroxy-2-pyrrolidinyl)methyl ester
aaccctgcgctctcgctgctt

SEQ ID NO: 363 - RNA, 21 nt, synthetic construct
  source 1..21: mol_type = other RNA
  modified_base 1: mod_base = OTHER; note = 2'-O-methylcytidine-3'-phosphorothioate
  modified_base 2: mod_base = OTHER; note = 2'-O-methylcytidine-3'-phosphorothioate
  modified_base 3: mod_base = OTHER; note = 2'-O-methylcytidine-3'-phosphate
  modified_base 4: mod_base = OTHER; note = 2'-O-methyluridine-3'-phosphate
  modified_base 5: mod_base = OTHER; note = 2'-O-methylguanosine-3'-phosphate
  modified_base 6: mod_base = OTHER; note = 2'-O-methylguanosine-3'-phosphate
  modified_base 7: mod_base = OTHER; note = 2'-deoxy-2'-fluoroguanosine-3'-phosphate
  modified_base 8: mod_base = OTHER; note = 2'-O-methyluridine-3'-phosphate
  modified_base 9: mod_base = OTHER; note = 2'-deoxy-2'-fluoroguanosine-3'-phosphate
  modified_base 10: mod_base = OTHER; note = 2'-deoxy-2'-fluorouridine-3'-phosphate
  modified_base 11: mod_base = OTHER; note = 2'-deoxy-2'-fluoroguanosine-3'-phosphate
  modified_base 12: mod_base = OTHER; note = 2'-O-methylguanosine-3'-phosphate
  modified_base 13: mod_base = OTHER; note = 2'-O-methyladenosine-3'-phosphate
  modified_base 14: mod_base = OTHER; note = 2'-O-methyladenosine-3'-phosphate
  modified_base 15: mod_base = OTHER; note = 2'-O-methylcytidine-3'-phosphate
  modified_base 16: mod_base = OTHER; note = 2'-O-methyladenosine-3'-phosphate
  modified_base 17: mod_base = OTHER; note = 2'-O-methylcytidine-3'-phosphate
  modified_base 18: mod_base = OTHER; note = 2'-O-methylcytidine-3'-phosphate
  modified_base 19: mod_base = OTHER; note = 2'-O-methyluridine-3'-phosphate
  modified_base 20: mod_base = OTHER; note = 2'-O-methyladenosine-3'-phosphate
  modified_base 21: mod_base = OTHER; note = 2'-O-methyluridine-3'-phosphate ((2S,4R)-1-[29-[[2-(acetylamino)-2-deoxy-beta-D-galactopyra nosyl]oxy]-14,14-bis[[3-[[3-[[5-[[2-(acetylamino)-2-deoxy-b eta-D-galactopyranosyl]oxy]-1-oxopentyl]amino]propyl]amino] -3-oxopropoxy]methyl]-1,12,19,25-tetraoxo-16-oxa-13,20,24-t riazanonacos-1-yl]-4-hydroxy-2-pyrrolidinyl)methyl ester
ccctgggtgtggaacacctat

SEQ ID NO: 364 - RNA, 21 nt, synthetic construct
  source 1..21: mol_type = other RNA
  modified_base 1: mod_base = OTHER; note = 2'-O-methylguanosine-3'-phosphorothioate
  modified_base 2: mod_base = OTHER; note = 2'-O-methylguanosine-3'-phosphorothioate
  modified_base 3: mod_base = OTHER; note = 2'-O-methyluridine-3'-phosphate
  modified_base 4: mod_base = OTHER; note = 2'-O-methylguanosine-3'-phosphate
  modified_base 5: mod_base = OTHER; note = 2'-O-methyluridine-3'-phosphate
  modified_base 6: mod_base = OTHER; note = 2'-O-methylguanosine-3'-phosphate
  modified_base 7: mod_base = OTHER; note = 2'-deoxy-2'-fluoroguanosine-3'-phosphate
  modified_base 8: mod_base = OTHER; note = 2'-O-methyladenosine-3'-phosphate
  modified_base 9: mod_base = OTHER; note = 2'-deoxy-2'-fluoroadenosine-3'-phosphate
  modified_base 10: mod_base = OTHER; note = 2'-deoxy-2'-fluorocytidine-3'-phosphate
  modified_base 11: mod_base = OTHER; note = 2'-deoxy-2'-fluoroadenosine-3'-phosphate
  modified_base 12: mod_base = OTHER; note = 2'-O-methylcytidine-3'-phosphate
  modified_base 13: mod_base = OTHER; note = 2'-O-methylcytidine-3'-phosphate
  modified_base 14: mod_base = OTHER; note = 2'-O-methyluridine-3'-phosphate
  modified_base 15: mod_base = OTHER; note = 2'-O-methyladenosine-3'-phosphate
  modified_base 16: mod_base = OTHER; note = 2'-O-methylcytidine-3'-phosphate
  modified_base 17: mod_base = OTHER; note = 2'-O-methylcytidine-3'-phosphate
  modified_base 18: mod_base = OTHER; note = 2'-O-methyladenosine-3'-phosphate
  modified_base 19: mod_base = OTHER; note = 2'-O-methylguanosine-3'-phosphate
  modified_base 20: mod_base = OTHER; note = 2'-O-methylguanosine-3'-phosphate
  modified_base 21: mod_base = OTHER; note = 2'-O-methyluridine-3'-phosphate ((2S,4R)-1-[29-[[2-(acetylamino)-2-deoxy-beta-D-galactopyra nosyl]oxy]-14,14-bis[[3-[[3-[[5-[[2-(acetylamino)-2-deoxy-b eta-D-galactopyranosyl]oxy]-1-oxopentyl]amino]propyl]amino] -3-oxopropoxy]methyl]-1,12,19,25-tetraoxo-16-oxa-13,20,24-t riazanonacos-1-yl]-4-hydroxy-2-pyrrolidinyl)methyl ester
ggtgtggaacacctaccaggt

SEQ ID NO: 365 - RNA, 21 nt, synthetic construct
  source 1..21: mol_type = other RNA
  modified_base 1: mod_base = OTHER; note = 2'-O-methyladenosine-3'-phosphorothioate
  modified_base 2: mod_base = OTHER; note = 2'-O-methylcytidine-3'-phosphorothioate
  modified_base 3: mod_base = OTHER; note = 2'-O-methylcytidine-3'-phosphate
  modified_base 4: mod_base = OTHER; note = 2'-O-methyluridine-3'-phosphate
  modified_base 5: mod_base = OTHER; note = 2'-O-methyladenosine-3'-phosphate
  modified_base 6: mod_base = OTHER; note = 2'-O-methylcytidine-3'-phosphate
  modified_base 7: mod_base = OTHER; note = 2'-deoxy-2'-fluorocytidine-3'-phosphate
  modified_base 8: mod_base = OTHER; note = 2'-O-methyladenosine-3'-phosphate
  modified_base 9: mod_base = OTHER; note = 2'-deoxy-2'-fluoroguanosine-3'-phosphate
  modified_base 10: mod_base = OTHER; note = 2'-deoxy-2'-fluoroguanosine-3'-phosphate
  modified_base 11: mod_base = OTHER; note = 2'-deoxy-2'-fluorocytidine-3'-phosphate
  modified_base 12: mod_base = OTHER; note = 2'-O-methylcytidine-3'-phosphate
  modified_base 13: mod_base = OTHER; note = 2'-O-methyluridine-3'-phosphate
  modified_base 14: mod_base = OTHER; note = 2'-O-methylguanosine-3'-phosphate
  modified_base 15: mod_base = OTHER; note = 2'-O-methyluridine-3'-phosphate
  modified_base 16: mod_base = OTHER; note = 2'-O-methylcytidine-3'-phosphate
  modified_base 17: mod_base = OTHER; note = 2'-O-methyluridine-3'-phosphate
  modified_base 18: mod_base = OTHER; note = 2'-O-methyladenosine-3'-phosphate
  modified_base 19: mod_base = OTHER; note = 2'-O-methyladenosine-3'-phosphate
  modified_base 20: mod_base = OTHER; note = 2'-O-methyladenosine-3'-phosphate
  modified_base 21: mod_base = OTHER; note = 2'-O-methyluridine-3'-phosphate ((2S,4R)-1-[29-[[2-(acetylamino)-2-deoxy-beta-D-galactopyra nosyl]oxy]-14,14-bis[[3-[[3-[[5-[[2-(acetylamino)-2-deoxy-b eta-D-galactopyranosyl]oxy]-1-oxopentyl]amino]propyl]amino] -3-oxopropoxy]methyl]-1,12,19,25-tetraoxo-16-oxa-13,20,24-t riazanonacos-1-yl]-4-hydroxy-2-pyrrolidinyl)methyl ester
acctaccaggcctgtctaaat

SEQ ID NO: 366 - RNA, 21 nt, synthetic construct
  source 1..21: mol_type = other RNA
  modified_base 1: mod_base = OTHER; note = 2'-O-methylguanosine-3'-phosphorothioate
  modified_base 2: mod_base = OTHER; note = 2'-O-methylcytidine-3'-phosphorothioate
  modified_base 3: mod_base = OTHER; note = 2'-O-methylcytidine-3'-phosphate
  modified_base 4: mod_base = OTHER; note = 2'-O-methyluridine-3'-phosphate
  modified_base 5: mod_base = OTHER; note = 2'-O-methylguanosine-3'-phosphate
  modified_base 6: mod_base = OTHER; note = 2'-O-methyluridine-3'-phosphate
  modified_base 7: mod_base = OTHER; note = 2'-deoxy-2'-fluorocytidine-3'-phosphate
  modified_base 8: mod_base = OTHER; note = 2'-O-methyluridine-3'-phosphate
  modified_base 9: mod_base = OTHER; note = 2'-deoxy-2'-fluoroadenosine-3'-phosphate
  modified_base 10: mod_base = OTHER; note = 2'-deoxy-2'-fluoroadenosine-3'-phosphate
  modified_base 11: mod_base = OTHER; note = 2'-deoxy-2'-fluoroadenosine-3'-phosphate
  modified_base 12: mod_base = OTHER; note = 2'-O-methylguanosine-3'-phosphate
  modified_base 13: mod_base = OTHER; note = 2'-O-methylguanosine-3'-phosphate
  modified_base 14: mod_base = OTHER; note = 2'-O-methyladenosine-3'-phosphate
  modified_base 15: mod_base = OTHER; note = 2'-O-methylcytidine-3'-phosphate
  modified_base 16: mod_base = OTHER; note = 2'-O-methyladenosine-3'-phosphate
  modified_base 17: mod_base = OTHER; note = 2'-O-methylcytidine-3'-phosphate
  modified_base 18: mod_base = OTHER; note = 2'-O-methyladenosine-3'-phosphate
  modified_base 19: mod_base = OTHER; note = 2'-O-methyluridine-3'-phosphate
  modified_base 20: mod_base = OTHER; note = 2'-O-methyluridine-3'-phosphate
  modified_base 21: mod_base = OTHER; note = 2'-O-methyluridine-3'-phosphate ((2S,4R)-1-[29-[[2-(acetylamino)-2-deoxy-beta-D-galactopyra nosyl]oxy]-14,14-bis[[3-[[3-[[5-[[2-(acetylamino)-2-deoxy-b eta-D-galactopyranosyl]oxy]-1-oxopentyl]amino]propyl]amino] -3-oxopropoxy]methyl]-1,12,19,25-tetraoxo-16-oxa-13,20,24-t riazanonacos-1-yl]-4-hydroxy-2-pyrrolidinyl)methyl ester
gcctgtctaaaggacacattt

SEQ ID NO: 367 - RNA, 21 nt, synthetic construct
  source 1..21: mol_type = other RNA
  modified_base 1: mod_base = OTHER; note = 2'-O-methyluridine-3'-phosphorothioate
  modified_base 2: mod_base = OTHER; note = 2'-O-methylcytidine-3'-phosphorothioate
  modified_base 3: mod_base = OTHER; note = 2'-O-methyluridine-3'-phosphate
  modified_base 4: mod_base = OTHER; note = 2'-O-methyladenosine-3'-phosphate
  modified_base 5: mod_base = OTHER; note = 2'-O-methyladenosine-3'-phosphate
  modified_base 6: mod_base = OTHER; note = 2'-O-methyladenosine-3'-phosphate
  modified_base 7: mod_base = OTHER; note = 2'-deoxy-2'-fluoroguanosine-3'-phosphate
  modified_base 8: mod_base = OTHER; note = 2'-O-methylguanosine-3'-phosphate
  modified_base 9: mod_base = OTHER; note = 2'-deoxy-2'-fluoroadenosine-3'-phosphate
  modified_base 10: mod_base = OTHER; note = 2'-deoxy-2'-fluorocytidine-3'-phosphate
  modified_base 11: mod_base = OTHER; note = 2'-deoxy-2'-fluoroadenosine-3'-phosphate
  modified_base 12: mod_base = OTHER; note = 2'-O-methylcytidine-3'-phosphate
  modified_base 13: mod_base = OTHER; note = 2'-O-methyladenosine-3'-phosphate
  modified_base 14: mod_base = OTHER; note = 2'-O-methyluridine-3'-phosphate
  modified_base 15: mod_base = OTHER; note = 2'-O-methyluridine-3'-phosphate
  modified_base 16: mod_base = OTHER; note = 2'-O-methylcytidine-3'-phosphate
  modified_base 17: mod_base = OTHER; note = 2'-O-methylguanosine-3'-phosphate
  modified_base 18: mod_base = OTHER; note = 2'-O-methyladenosine-3'-phosphate
  modified_base 19: mod_base = OTHER; note = 2'-O-methylguanosine-3'-phosphate
  modified_base 20: mod_base = OTHER; note = 2'-O-methylcytidine-3'-phosphate
  modified_base 21: mod_base = OTHER; note = 2'-O-methyluridine-3'-phosphate ((2S,4R)-1-[29-[[2-(acetylamino)-2-deoxy-beta-D-galactopyra nosyl]oxy]-14,14-bis[[3-[[3-[[5-[[2-(acetylamino)-2-deoxy-b eta-D-galactopyranosyl]oxy]-1-oxopentyl]amino]propyl]amino] -3-oxopropoxy]methyl]-1,12,19,25-tetraoxo-16-oxa-13,20,24-t riazanonacos-1-yl]-4-hydroxy-2-pyrrolidinyl)methyl ester
tctaaaggacacattcgagct

SEQ ID NO: 368 - RNA, 21 nt, synthetic construct
  source 1..21: mol_type = other RNA
  modified_base 1: mod_base = OTHER; note = 2'-O-methylguanosine-3'-phosphorothioate
  modified_base 2: mod_base = OTHER; note = 2'-O-methylguanosine-3'-phosphorothioate
  modified_base 3: mod_base = OTHER; note = 2'-O-methyladenosine-3'-phosphate
  modified_base 4: mod_base = OTHER; note = 2'-O-methylcytidine-3'-phosphate
  modified_base 5: mod_base = OTHER; note = 2'-O-methyladenosine-3'-phosphate
  modified_base 6: mod_base = OTHER; note = 2'-O-methylcytidine-3'-phosphate
  modified_base 7: mod_base = OTHER; note = 2'-deoxy-2'-fluoroadenosine-3'-phosphate
  modified_base 8: mod_base = OTHER; note = 2'-O-methyluridine-3'-phosphate
  modified_base 9: mod_base = OTHER; note = 2'-deoxy-2'-fluorouridine-3'-phosphate
  modified_base 10: mod_base = OTHER; note = 2'-deoxy-2'-fluorocytidine-3'-phosphate
  modified_base 11: mod_base = OTHER; note = 2'-deoxy-2'-fluoroguanosine-3'-phosphate
  modified_base 12: mod_base = OTHER; note = 2'-O-methyladenosine-3'-phosphate
  modified_base 13: mod_base = OTHER; note = 2'-O-methylguanosine-3'-phosphate
  modified_base 14: mod_base = OTHER; note = 2'-O-methylcytidine-3'-phosphate
  modified_base 15: mod_base = OTHER; note = 2'-O-methylguanosine-3'-phosphate
  modified_base 16: mod_base = OTHER; note = 2'-O-methylguanosine-3'-phosphate
  modified_base 17: mod_base = OTHER; note = 2'-O-methylcytidine-3'-phosphate
  modified_base 18: mod_base = OTHER; note = 2'-O-methyluridine-3'-phosphate
  modified_base 19: mod_base = OTHER; note = 2'-O-methylguanosine-3'-phosphate
  modified_base 20: mod_base = OTHER; note = 2'-O-methylguanosine-3'-phosphate
  modified_base 21: mod_base = OTHER; note = 2'-O-methyluridine-3'-phosphate ((2S,4R)-1-[29-[[2-(acetylamino)-2-deoxy-beta-D-galactopyra nosyl]oxy]-14,14-bis[[3-[[3-[[5-[[2-(acetylamino)-2-deoxy-b eta-D-galactopyranosyl]oxy]-1-oxopentyl]amino]propyl]amino] -3-oxopropoxy]methyl]-1,12,19,25-tetraoxo-16-oxa-13,20,24-t riazanonacos-1-yl]-4-hydroxy-2-pyrrolidinyl)methyl ester
ggacacattcgagcggctggt

SEQ ID NO: 369 - RNA, 21 nt, synthetic construct
  source 1..21: mol_type = other RNA
  modified_base 1: mod_base = OTHER; note = 2'-O-methylguanosine-3'-phosphorothioate
  modified_base 2: mod_base = OTHER; note = 2'-O-methylguanosine-3'-phosphorothioate
  modified_base 3: mod_base = OTHER; note = 2'-O-methylcytidine-3'-phosphate
  modified_base 4: mod_base = OTHER; note = 2'-O-methylcytidine-3'-phosphate
  modified_base 5: mod_base = OTHER; note = 2'-O-methyluridine-3'-phosphate
  modified_base 6: mod_base = OTHER; note = 2'-O-methyluridine-3'-phosphate
  modified_base 7: mod_base = OTHER; note = 2'-deoxy-2'-fluorocytidine-3'-phosphate
  modified_base 8: mod_base = OTHER; note = 2'-O-methylguanosine-3'-phosphate
  modified_base 9: mod_base = OTHER; note = 2'-deoxy-2'-fluoroguanosine-3'-phosphate
  modified_base 10: mod_base = OTHER; note = 2'-deoxy-2'-fluoroadenosine-3'-phosphate
  modified_base 11: mod_base = OTHER; note = 2'-deoxy-2'-fluoroguanosine-3'-phosphate
  modified_base 12: mod_base = OTHER; note = 2'-O-methyluridine-3'-phosphate
  modified_base 13: mod_base = OTHER; note = 2'-O-methylguanosine-3'-phosphate
  modified_base 14: mod_base = OTHER; note = 2'-O-methyladenosine-3'-phosphate
  modified_base 15: mod_base = OTHER; note = 2'-O-methyladenosine-3'-phosphate
  modified_base 16: mod_base = OTHER; note = 2'-O-methylguanosine-3'-phosphate
  modified_base 17: mod_base = OTHER; note = 2'-O-methylcytidine-3'-phosphate
  modified_base 18: mod_base = OTHER; note = 2'-O-methyluridine-3'-phosphate
  modified_base 19: mod_base = OTHER; note = 2'-O-methylguanosine-3'-phosphate
  modified_base 20: mod_base = OTHER; note = 2'-O-methylguanosine-3'-phosphate
  modified_base 21: mod_base = OTHER; note = 2'-O-methyluridine-3'-phosphate ((2S,4R)-1-[29-[[2-(acetylamino)-2-deoxy-beta-D-galactopyra nosyl]oxy]-14,14-bis[[3-[[3-[[5-[[2-(acetylamino)-2-deoxy-b eta-D-galactopyranosyl]oxy]-1-oxopentyl]amino]propyl]amino] -3-oxopropoxy]methyl]-1,12,19,25-tetraoxo-16-oxa-13,20,24-t riazanonacos-1-yl]-4-hydroxy-2-pyrrolidinyl)methyl ester
ggccttcggagtgaagctggt

SEQ ID NO: 370 - RNA, 21 nt, synthetic construct
  source 1..21: mol_type = other RNA
  modified_base 1: mod_base = OTHER; note = 2'-O-methylcytidine-3'-phosphorothioate
  modified_base 2: mod_base = OTHER; note = 2'-O-methylguanosine-3'-phosphorothioate
  modified_base 3: mod_base = OTHER; note = 2'-O-methylguanosine-3'-phosphate
  modified_base 4: mod_base = OTHER; note = 2'-O-methyladenosine-3'-phosphate
  modified_base 5: mod_base = OTHER; note = 2'-O-methylguanosine-3'-phosphate
  modified_base 6: mod_base = OTHER; note = 2'-O-methyluridine-3'-phosphate
  modified_base 7: mod_base = OTHER; note = 2'-deoxy-2'-fluoroguanosine-3'-phosphate
  modified_base 8: mod_base = OTHER; note = 2'-O-methyladenosine-3'-phosphate
  modified_base 9: mod_base = OTHER; note = 2'-deoxy-2'-fluoroadenosine-3'-phosphate
  modified_base 10: mod_base = OTHER; note = 2'-deoxy-2'-fluoroguanosine-3'-phosphate
  modified_base 11: mod_base = OTHER; note = 2'-deoxy-2'-fluorocytidine-3'-phosphate
  modified_base 12: mod_base = OTHER; note = 2'-O-methyluridine-3'-phosphate
  modified_base 13: mod_base = OTHER; note = 2'-O-methylguanosine-3'-phosphate
  modified_base 14: mod_base = OTHER; note = 2'-O-methylguanosine-3'-phosphate
  modified_base 15: mod_base = OTHER; note = 2'-O-methyluridine-3'-phosphate
  modified_base 16: mod_base = OTHER; note = 2'-O-methyladenosine-3'-phosphate
  modified_base 17: mod_base = OTHER; note = 2'-O-methylcytidine-3'-phosphate
  modified_base 18: mod_base = OTHER; note = 2'-O-methylguanosine-3'-phosphate
  modified_base 19: mod_base = OTHER; note = 2'-O-methyladenosine-3'-phosphate
  modified_base 20: mod_base = OTHER; note = 2'-O-methylguanosine-3'-phosphate
  modified_base 21: mod_base = OTHER; note = 2'-O-methyluridine-3'-phosphate ((2S,4R)-1-[29-[[2-(acetylamino)-2-deoxy-beta-D-galactopyra nosyl]oxy]-14,14-bis[[3-[[3-[[5-[[2-(acetylamino)-2-deoxy-b eta-D-galactopyranosyl]oxy]-1-oxopentyl]amino]propyl]amino] -3-oxopropoxy]methyl]-1,12,19,25-tetraoxo-16-oxa-13,20,24-t riazanonacos-1-yl]-4-hydroxy-2-pyrrolidinyl)methyl ester
cggagtgaagctggtacgagt

SEQ ID NO: 371 - RNA, 21 nt, synthetic construct
  source 1..21: mol_type = other RNA
  modified_base 1: mod_base = OTHER; note = 2'-O-methyluridine-3'-phosphorothioate
  modified_base 2: mod_base = OTHER; note = 2'-O-methylguanosine-3'-phosphorothioate
  modified_base 3: mod_base = OTHER; note = 2'-O-methyladenosine-3'-phosphate
  modified_base 4: mod_base = OTHER; note = 2'-O-methyladenosine-3'-phosphate
  modified_base 5: mod_base = OTHER; note = 2'-O-methylguanosine-3'-phosphate
  modified_base 6: mod_base = OTHER; note = 2'-O-methylcytidine-3'-phosphate
  modified_base 7: mod_base = OTHER; note = 2'-deoxy-2'-fluorouridine-3'-phosphate
  modified_base 8: mod_base = OTHER; note = 2'-O-methylguanosine-3'-phosphate
  modified_base 9: mod_base = OTHER; note = 2'-deoxy-2'-fluoroguanosine-3'-phosphate
  modified_base 10: mod_base = OTHER; note = 2'-deoxy-2'-fluorouridine-3'-phosphate
  modified_base 11: mod_base = OTHER; note = 2'-deoxy-2'-fluoroadenosine-3'-phosphate
  modified_base 12: mod_base = OTHER; note = 2'-O-methylcytidine-3'-phosphate
  modified_base 13: mod_base = OTHER; note = 2'-O-methylguanosine-3'-phosphate
  modified_base 14: mod_base = OTHER; note = 2'-O-methyladenosine-3'-phosphate
  modified_base 15: mod_base = OTHER; note = 2'-O-methylguanosine-3'-phosphate
  modified_base 16: mod_base = OTHER; note = 2'-O-methylguanosine-3'-phosphate
  modified_base 17: mod_base = OTHER; note = 2'-O-methyluridine-3'-phosphate
  modified_base 18: mod_base = OTHER; note = 2'-O-methylguanosine-3'-phosphate
  modified_base 19: mod_base = OTHER; note = 2'-O-methylcytidine-3'-phosphate
  modified_base 20: mod_base = OTHER; note = 2'-O-methyladenosine-3'-phosphate
  modified_base 21: mod_base = OTHER; note = 2'-O-methyluridine-3'-phosphate ((2S,4R)-1-[29-[[2-(acetylamino)-2-deoxy-beta-D-galactopyra nosyl]oxy]-14,14-bis[[3-[[3-[[5-[[2-(acetylamino)-2-deoxy-b eta-D-galactopyranosyl]oxy]-1-oxopentyl]amino]propyl]amino] -3-oxopropoxy]methyl]-1,12,19,25-tetraoxo-16-oxa-13,20,24-t riazanonacos-1-yl]-4-hydroxy-2-pyrrolidinyl)methyl ester
tgaagctggtacgaggtgcat

SEQ ID NO: 372 - RNA, 21 nt, synthetic construct
  source 1..21: mol_type = other RNA
  modified_base 1: mod_base = OTHER; note = 2'-O-methylcytidine-3'-phosphorothioate
  modified_base 2: mod_base = OTHER; note = 2'-O-methyluridine-3'-phosphorothioate
  modified_base 3: mod_base = OTHER; note = 2'-O-methylguanosine-3'-phosphate
  modified_base 4: mod_base = OTHER; note = 2'-O-methylguanosine-3'-phosphate
  modified_base 5: mod_base = OTHER; note = 2'-O-methyluridine-3'-phosphate
  modified_base 6: mod_base = OTHER; note = 2'-O-methyladenosine-3'-phosphate
  modified_base 7: mod_base = OTHER; note = 2'-deoxy-2'-fluorocytidine-3'-phosphate
  modified_base 8: mod_base = OTHER; note = 2'-O-methylguanosine-3'-phosphate
  modified_base 9: mod_base = OTHER; note = 2'-deoxy-2'-fluoroadenosine-3'-phosphate
  modified_base 10: mod_base = OTHER; note = 2'-deoxy-2'-fluoroguanosine-3'-phosphate
  modified_base 11: mod_base = OTHER; note = 2'-deoxy-2'-fluoroguanosine-3'-phosphate
  modified_base 12: mod_base = OTHER; note = 2'-O-methyluridine-3'-phosphate
  modified_base 13: mod_base = OTHER; note = 2'-O-methylguanosine-3'-phosphate
  modified_base 14: mod_base = OTHER; note = 2'-O-methylcytidine-3'-phosphate
  modified_base 15: mod_base = OTHER; note = 2'-O-methyladenosine-3'-phosphate
  modified_base 16: mod_base = OTHER; note = 2'-O-methyluridine-3'-phosphate
  modified_base 17: mod_base = OTHER; note = 2'-O-methyladenosine-3'-phosphate
  modified_base 18: mod_base = OTHER; note = 2'-O-methyluridine-3'-phosphate
  modified_base 19: mod_base = OTHER; note = 2'-O-methylcytidine-3'-phosphate
  modified_base 20: mod_base = OTHER; note = 2'-O-methyluridine-3'-phosphate
  modified_base 21: mod_base = OTHER; note = 2'-O-methyluridine-3'-phosphate ((2S,4R)-1-[29-[[2-(acetylamino)-2-deoxy-beta-D-galactopyra nosyl]oxy]-14,14-bis[[3-[[3-[[5-[[2-(acetylamino)-2-deoxy-b eta-D-galactopyranosyl]oxy]-1-oxopentyl]amino]propyl]amino] -3-oxopropoxy]methyl]-1,12,19,25-tetraoxo-16-oxa-13,20,24-t riazanonacos-1-yl]-4-hydroxy-2-pyrrolidinyl)methyl ester
ctggtacgaggtgcatatctt

SEQ ID NO: 373 - RNA, 21 nt, synthetic construct
  source 1..21: mol_type = other RNA
  modified_base 1: mod_base = OTHER; note = 2'-O-methylguanosine-3'-phosphorothioate
  modified_base 2: mod_base = OTHER; note = 2'-O-methyladenosine-3'-phosphorothioate
  modified_base 3: mod_base = OTHER; note = 2'-O-methylguanosine-3'-phosphate
  modified_base 4: mod_base = OTHER; note = 2'-O-methylguanosine-3'-phosphate
  modified_base 5: mod_base = OTHER; note = 2'-O-methyluridine-3'-phosphate
  modified_base 6: mod_base = OTHER; note = 2'-O-methylguanosine-3'-phosphate
  modified_base 7: mod_base = OTHER; note = 2'-deoxy-2'-fluorocytidine-3'-phosphate
  modified_base 8: mod_base = OTHER; note = 2'-O-methyladenosine-3'-phosphate
  modified_base 9: mod_base = OTHER; note = 2'-deoxy-2'-fluorouridine-3'-phosphate
  modified_base 10: mod_base = OTHER; note = 2'-deoxy-2'-fluoroadenosine-3'-phosphate
  modified_base 11: mod_base = OTHER; note = 2'-deoxy-2'-fluorouridine-3'-phosphate
  modified_base 12: mod_base = OTHER; note = 2'-O-methylcytidine-3'-phosphate
  modified_base 13: mod_base = OTHER; note = 2'-O-methyluridine-3'-phosphate
  modified_base 14: mod_base = OTHER; note = 2'-O-methylguanosine-3'-phosphate
  modified_base 15: mod_base = OTHER; note = 2'-O-methylguanosine-3'-phosphate
  modified_base 16: mod_base = OTHER; note = 2'-O-methyladenosine-3'-phosphate
  modified_base 17: mod_base = OTHER; note = 2'-O-methylcytidine-3'-phosphate
  modified_base 18: mod_base = OTHER; note = 2'-O-methyladenosine-3'-phosphate
  modified_base 19: mod_base = OTHER; note = 2'-O-methyladenosine-3'-phosphate
  modified_base 20: mod_base = OTHER; note = 2'-O-methylguanosine-3'-phosphate
  modified_base 21: mod_base = OTHER; note = 2'-O-methyluridine-3'-phosphate ((2S,4R)-1-[29-[[2-(acetylamino)-2-deoxy-beta-D-galactopyra nosyl]oxy]-14,14-bis[[3-[[3-[[5-[[2-(acetylamino)-2-deoxy-b eta-D-galactopyranosyl]oxy]-1-oxopentyl]amino]propyl]amino] -3-oxopropoxy]methyl]-1,12,19,25-tetraoxo-16-oxa-13,20,24-t riazanonacos-1-yl]-4-hydroxy-2-pyrrolidinyl)methyl ester
gaggtgcatatctggacaagt

SEQ ID NO: 374 - RNA, 21 nt, synthetic construct
  source 1..21: mol_type = other RNA
  modified_base 1: mod_base = OTHER; note = 2'-O-methylcytidine-3'-phosphorothioate
  modified_base 2: mod_base = OTHER; note = 2'-O-methyladenosine-3'-phosphorothioate
  modified_base 3: mod_base = OTHER; note = 2'-O-methyluridine-3'-phosphate
  modified_base 4: mod_base = OTHER; note = 2'-O-methyladenosine-3'-phosphate
  modified_base 5: mod_base = OTHER; note = 2'-O-methyluridine-3'-phosphate
  modified_base 6: mod_base = OTHER; note = 2'-O-methylcytidine-3'-phosphate
  modified_base 7: mod_base = OTHER; note = 2'-deoxy-2'-fluorouridine-3'-phosphate
  modified_base 8: mod_base = OTHER; note = 2'-O-methylguanosine-3'-phosphate
  modified_base 9: mod_base = OTHER; note = 2'-deoxy-2'-fluoroguanosine-3'-phosphate
  modified_base 10: mod_base = OTHER; note = 2'-deoxy-2'-fluoroadenosine-3'-phosphate
  modified_base 11: mod_base = OTHER; note = 2'-deoxy-2'-fluorocytidine-3'-phosphate
  modified_base 12: mod_base = OTHER; note = 2'-O-methyladenosine-3'-phosphate
  modified_base 13: mod_base = OTHER; note = 2'-O-methyladenosine-3'-phosphate
  modified_base 14: mod_base = OTHER; note = 2'-O-methylguanosine-3'-phosphate
  modified_base 15: mod_base = OTHER; note = 2'-O-methylguanosine-3'-phosphate
  modified_base 16: mod_base = OTHER; note = 2'-O-methyladenosine-3'-phosphate
  modified_base 17: mod_base = OTHER; note = 2'-O-methylguanosine-3'-phosphate
  modified_base 18: mod_base = OTHER; note = 2'-O-methyladenosine-3'-phosphate
  modified_base 19: mod_base = OTHER; note = 2'-O-methylguanosine-3'-phosphate
  modified_base 20: mod_base = OTHER; note = 2'-O-methyladenosine-3'-phosphate
  modified_base 21: mod_base = OTHER; note = 2'-O-methyluridine-3'-phosphate ((2S,4R)-1-[29-[[2-(acetylamino)-2-deoxy-beta-D-galactopyra nosyl]oxy]-14,14-bis[[3-[[3-[[5-[[2-(acetylamino)-2-deoxy-b eta-D-galactopyranosyl]oxy]-1-oxopentyl]amino]propyl]amino] -3-oxopropoxy]methyl]-1,12,19,25-tetraoxo-16-oxa-13,20,24-t riazanonacos-1-yl]-4-hydroxy-2-pyrrolidinyl)methyl ester
catatctggacaaggagagat

SEQ ID NO: 375 - RNA, 21 nt, synthetic construct
  source 1..21: mol_type = other RNA
  modified_base 1: mod_base = OTHER; note = 2'-O-methylcytidine-3'-phosphorothioate
  modified_base 2: mod_base = OTHER; note = 2'-O-methyluridine-3'-phosphorothioate
  modified_base 3: mod_base = OTHER; note = 2'-O-methylguanosine-3'-phosphate
  modified_base 4: mod_base = OTHER; note = 2'-O-methylguanosine-3'-phosphate
  modified_base 5: mod_base = OTHER; note = 2'-O-methyladenosine-3'-phosphate
  modified_base 6: mod_base = OTHER; note = 2'-O-methylcytidine-3'-phosphate
  modified_base 7: mod_base = OTHER; note = 2'-deoxy-2'-fluoroadenosine-3'-phosphate
  modified_base 8: mod_base = OTHER; note = 2'-O-methyladenosine-3'-phosphate
  modified_base 9: mod_base = OTHER; note = 2'-deoxy-2'-fluoroguanosine-3'-phosphate
  modified_base 10: mod_base = OTHER; note = 2'-deoxy-2'-fluoroguanosine-3'-phosphate
  modified_base 11: mod_base = OTHER; note = 2'-deoxy-2'-fluoroadenosine-3'-phosphate
  modified_base 12: mod_base = OTHER; note = 2'-O-methylguanosine-3'-phosphate
  modified_base 13: mod_base = OTHER; note = 2'-O-methyladenosine-3'-phosphate
  modified_base 14: mod_base = OTHER; note = 2'-O-methylguanosine-3'-phosphate
  modified_base 15: mod_base = OTHER; note = 2'-O-methyladenosine-3'-phosphate
  modified_base 16: mod_base = OTHER; note = 2'-O-methylguanosine-3'-phosphate
  modified_base 17: mod_base = OTHER; note = 2'-O-methylcytidine-3'-phosphate
  modified_base 18: mod_base = OTHER; note = 2'-O-methylguanosine-3'-phosphate
  modified_base 19: mod_base = OTHER; note = 2'-O-methylguanosine-3'-phosphate
  modified_base 20: mod_base = OTHER; note = 2'-O-methyluridine-3'-phosphate
  modified_base 21: mod_base = OTHER; note = 2'-O-methyluridine-3'-phosphate ((2S,4R)-1-[29-[[2-(acetylamino)-2-deoxy-beta-D-galactopyra nosyl]oxy]-14,14-bis[[3-[[3-[[5-[[2-(acetylamino)-2-deoxy-b eta-D-galactopyranosyl]oxy]-1-oxopentyl]amino]propyl]amino] -3-oxopropoxy]methyl]-1,12,19,25-tetraoxo-16-oxa-13,20,24-t riazanonacos-1-yl]-4-hydroxy-2-pyrrolidinyl)methyl ester
ctggacaaggagagagcggtt

SEQ ID NO: 376 - RNA, 21 nt, synthetic construct
  source 1..21: mol_type = other RNA
  modified_base 1: mod_base = OTHER; note = 2'-O-methylguanosine-3'-phosphorothioate
  modified_base 2: mod_base = OTHER; note = 2'-O-methylcytidine-3'-phosphorothioate
  modified_base 3: mod_base = OTHER; note = 2'-O-methylcytidine-3'-phosphate
  modified_base 4: mod_base = OTHER; note = 2'-O-methylcytidine-3'-phosphate
  modified_base 5: mod_base = OTHER; note = 2'-O-methyladenosine-3'-phosphate
  modified_base 6: mod_base = OTHER; note = 2'-O-methylguanosine-3'-phosphate
  modified_base 7: mod_base = OTHER; note = 2'-deoxy-2'-fluorocytidine-3'-phosphate
  modified_base 8: mod_base = OTHER; note = 2'-O-methyluridine-3'-phosphate
  modified_base 9: mod_base = OTHER; note = 2'-deoxy-2'-fluorocytidine-3'-phosphate
  modified_base 10: mod_base = OTHER; note = 2'-deoxy-2'-fluorocytidine-3'-phosphate
  modified_base 11: mod_base = OTHER; note = 2'-deoxy-2'-fluoroadenosine-3'-phosphate
  modified_base 12: mod_base = OTHER; note = 2'-O-methyluridine-3'-phosphate
  modified_base 13: mod_base = OTHER; note = 2'-O-methylguanosine-3'-phosphate
  modified_base 14: mod_base = OTHER; note = 2'-O-methylguanosine-3'-phosphate
  modified_base 15: mod_base = OTHER; note = 2'-O-methylguanosine-3'-phosphate
  modified_base 16: mod_base = OTHER; note = 2'-O-methyladenosine-3'-phosphate
  modified_base 17: mod_base = OTHER; note = 2'-O-methyluridine-3'-phosphate
  modified_base 18: mod_base = OTHER; note = 2'-O-methylguanosine-3'-phosphate
  modified_base 19: mod_base = OTHER; note = 2'-O-methylguanosine-3'-phosphate
  modified_base 20: mod_base = OTHER; note = 2'-O-methyladenosine-3'-phosphate
  modified_base 21: mod_base = OTHER; note = 2'-O-methyluridine-3'-phosphate ((2S,4R)-1-[29-[[2-(acetylamino)-2-deoxy-beta-D-galactopyra nosyl]oxy]-14,14-bis[[3-[[3-[[5-[[2-(acetylamino)-2-deoxy-b eta-D-galactopyranosyl]oxy]-1-oxopentyl]amino]propyl]amino] -3-oxopropoxy]methyl]-1,12,19,25-tetraoxo-16-oxa-13,20,24-t riazanonacos-1-yl]-4-hydroxy-2-pyrrolidinyl)methyl ester
gcccagctccatgggatggat

SEQ ID NO: 377 - RNA, 21 nt, synthetic construct
  source 1..21: mol_type = other RNA
  modified_base 1: mod_base = OTHER; note = 2'-O-methylguanosine-3'-phosphorothioate
  modified_base 2: mod_base = OTHER; note = 2'-O-methylcytidine-3'-phosphorothioate
  modified_base 3: mod_base = OTHER; note = 2'-O-methyluridine-3'-phosphate
  modified_base 4: mod_base = OTHER; note = 2'-O-methylcytidine-3'-phosphate
  modified_base 5: mod_base = OTHER; note = 2'-O-methylcytidine-3'-phosphate
  modified_base 6: mod_base = OTHER; note = 2'-O-methyladenosine-3'-phosphate
  modified_base 7: mod_base = OTHER; note = 2'-deoxy-2'-fluorouridine-3'-phosphate
  modified_base 8: mod_base = OTHER; note = 2'-O-methylguanosine-3'-phosphate
  modified_base 9: mod_base = OTHER; note = 2'-deoxy-2'-fluoroguanosine-3'-phosphate
  modified_base 10: mod_base = OTHER; note = 2'-deoxy-2'-fluoroguanosine-3'-phosphate
  modified_base 11: mod_base = OTHER; note = 2'-deoxy-2'-fluoroadenosine-3'-phosphate
  modified_base 12: mod_base = OTHER; note = 2'-O-methyluridine-3'-phosphate
  modified_base 13: mod_base = OTHER; note = 2'-O-methylguanosine-3'-phosphate
  modified_base 14: mod_base = OTHER; note = 2'-O-methylguanosine-3'-phosphate
  modified_base 15: mod_base = OTHER; note = 2'-O-methyladenosine-3'-phosphate
  modified_base 16: mod_base = OTHER; note = 2'-O-methyladenosine-3'-phosphate
  modified_base 17: mod_base = OTHER; note = 2'-O-methylguanosine-3'-phosphate
  modified_base 18: mod_base = OTHER; note = 2'-O-methyladenosine-3'-phosphate
  modified_base 19: mod_base = OTHER; note = 2'-O-methylcytidine-3'-phosphate
  modified_base 20: mod_base = OTHER; note = 2'-O-methylcytidine-3'-phosphate
  modified_base 21: mod_base = OTHER; note = 2'-O-methyluridine-3'-phosphate ((2S,4R)-1-[29-[[2-(acetylamino)-2-deoxy-beta-D-galactopyra nosyl]oxy]-14,14-bis[[3-[[3-[[5-[[2-(acetylamino)-2-deoxy-b eta-D-galactopyranosyl]oxy]-1-oxopentyl]amino]propyl]amino] -3-oxopropoxy]methyl]-1,12,19,25-tetraoxo-16-oxa-13,20,24-t riazanonacos-1-yl]-4-hydroxy-2-pyrrolidinyl)methyl ester
gctccatgggatggaagacct

SEQ ID NO: 378 - RNA, 21 nt, synthetic construct
  source 1..21: mol_type = other RNA
  modified_base 1: mod_base = OTHER; note = 2'-O-methylcytidine-3'-phosphorothioate
  modified_base 2: mod_base = OTHER; note = 2'-O-methyluridine-3'-phosphorothioate
  modified_base 3: mod_base = OTHER; note = 2'-O-methylcytidine-3'-phosphate
  modified_base 4: mod_base = OTHER; note = 2'-O-methyladenosine-3'-phosphate
  modified_base 5: mod_base = OTHER; note = 2'-O-methylguanosine-3'-phosphate
  modified_base 6: mod_base = OTHER; note = 2'-O-methylcytidine-3'-phosphate
  modified_base 7: mod_base = OTHER; note = 2'-deoxy-2'-fluorocytidine-3'-phosphate
  modified_base 8: mod_base = OTHER; note = 2'-O-methyluridine-3'-phosphate
  modified_base 9: mod_base = OTHER; note = 2'-deoxy-2'-fluoroguanosine-3'-phosphate
  modified_base 10: mod_base = OTHER; note = 2'-deoxy-2'-fluoroadenosine-3'-phosphate
  modified_base 11: mod_base = OTHER; note = 2'-deoxy-2'-fluorocytidine-3'-phosphate
  modified_base 12: mod_base = OTHER; note = 2'-O-methyluridine-3'-phosphate
  modified_base 13: mod_base = OTHER; note = 2'-O-methyladenosine-3'-phosphate
  modified_base 14: mod_base = OTHER; note = 2'-O-methyluridine-3'-phosphate
  modified_base 15: mod_base = OTHER; note = 2'-O-methylguanosine-3'-phosphate
  modified_base 16: mod_base = OTHER; note = 2'-O-methyladenosine-3'-phosphate
  modified_base 17: mod_base = OTHER; note = 2'-O-methylguanosine-3'-phosphate
  modified_base 18: mod_base = OTHER; note = 2'-O-methylguanosine-3'-phosphate
  modified_base 19: mod_base = OTHER; note = 2'-O-methylcytidine-3'-phosphate
  modified_base 20: mod_base = OTHER; note = 2'-O-methylcytidine-3'-phosphate
  modified_base 21: mod_base = OTHER; note = 2'-O-methyluridine-3'-phosphate ((2S,4R)-1-[29-[[2-(acetylamino)-2-deoxy-beta-D-galactopyra nosyl]oxy]-14,14-bis[[3-[[3-[[5-[[2-(acetylamino)-2-deoxy-b eta-D-galactopyranosyl]oxy]-1-oxopentyl]amino]propyl]amino] -3-oxopropoxy]methyl]-1,12,19,25-tetraoxo-16-oxa-13,20,24-t riazanonacos-1-yl]-4-hydroxy-2-pyrrolidinyl)methyl ester
ctcagcctgactatgaggcct

SEQ ID NO: 379 - RNA, 21 nt, synthetic construct
  source 1..21: mol_type = other RNA
  modified_base 1: mod_base = OTHER; note = 2'-O-methylguanosine-3'-phosphorothioate
  modified_base 2: mod_base = OTHER; note = 2'-O-methyladenosine-3'-phosphorothioate
  modified_base 3: mod_base = OTHER; note = 2'-O-methylcytidine-3'-phosphate
  modified_base 4: mod_base = OTHER; note = 2'-O-methyluridine-3'-phosphate
  modified_base 5: mod_base = OTHER; note = 2'-O-methyladenosine-3'-phosphate
  modified_base 6: mod_base = OTHER; note = 2'-O-methyluridine-3'-phosphate
  modified_base 7: mod_base = OTHER; note = 2'-deoxy-2'-fluoroguanosine-3'-phosphate
  modified_base 8: mod_base = OTHER; note = 2'-O-methyladenosine-3'-phosphate
  modified_base 9: mod_base = OTHER; note = 2'-deoxy-2'-fluoroguanosine-3'-phosphate
  modified_base 10: mod_base = OTHER; note = 2'-deoxy-2'-fluoroguanosine-3'-phosphate
  modified_base 11: mod_base = OTHER; note = 2'-deoxy-2'-fluorocytidine-3'-phosphate
  modified_base 12: mod_base = OTHER; note = 2'-O-methylcytidine-3'-phosphate
  modified_base 13: mod_base = OTHER; note = 2'-O-methyladenosine-3'-phosphate
  modified_base 14: mod_base = OTHER; note = 2'-O-methylcytidine-3'-phosphate
  modified_base 15: mod_base = OTHER; note = 2'-O-methylcytidine-3'-phosphate
  modified_base 16: mod_base = OTHER; note = 2'-O-methyladenosine-3'-phosphate
  modified_base 17: mod_base = OTHER; note = 2'-O-methylguanosine-3'-phosphate
  modified_base 18: mod_base = OTHER; note = 2'-O-methyluridine-3'-phosphate
  modified_base 19: mod_base = OTHER; note = 2'-O-methylcytidine-3'-phosphate
  modified_base 20: mod_base = OTHER; note = 2'-O-methyladenosine-3'-phosphate
  modified_base 21: mod_base = OTHER; note = 2'-O-methyluridine-3'-phosphate ((2S,4R)-1-[29-[[2-(acetylamino)-2-deoxy-beta-D-galactopyra nosyl]oxy]-14,14-bis[[3-[[3-[[5-[[2-(acetylamino)-2-deoxy-b eta-D-galactopyranosyl]oxy]-1-oxopentyl]amino]propyl]amino] -3-oxopropoxy]methyl]-1,12,19,25-tetraoxo-16-oxa-13,20,24-t riazanonacos-1-yl]-4-hydroxy-2-pyrrolidinyl)methyl ester
gactatgaggccaccagtcat

SEQ ID NO: 380 - RNA, 21 nt, synthetic construct
  source 1..21: mol_type = other RNA
  modified_base 1: mod_base = OTHER; note = 2'-O-methylguanosine-3'-phosphorothioate
  modified_base 2: mod_base = OTHER; note = 2'-O-methyladenosine-3'-phosphorothioate
  modified_base 3: mod_base = OTHER; note = 2'-O-methylguanosine-3'-phosphate
  modified_base 4: mod_base = OTHER; note = 2'-O-methylguanosine-3'-phosphate
  modified_base 5: mod_base = OTHER; note = 2'-O-methylcytidine-3'-phosphate
  modified_base 6: mod_base = OTHER; note = 2'-O-methylcytidine-3'-phosphate
  modified_base 7: mod_base = OTHER; note = 2'-deoxy-2'-fluoroadenosine-3'-phosphate
  modified_base 8: mod_base = OTHER; note = 2'-O-methylcytidine-3'-phosphate
  modified_base 9: mod_base = OTHER; note = 2'-deoxy-2'-fluorocytidine-3'-phosphate
  modified_base 10: mod_base = OTHER; note = 2'-deoxy-2'-fluoroadenosine-3'-phosphate
  modified_base 11: mod_base = OTHER; note = 2'-deoxy-2'-fluoroguanosine-3'-phosphate
  modified_base 12: mod_base = OTHER; note = 2'-O-methyluridine-3'-phosphate
  modified_base 13: mod_base = OTHER; note = 2'-O-methylcytidine-3'-phosphate
  modified_base 14: mod_base = OTHER; note = 2'-O-methyladenosine-3'-phosphate
  modified_base 15: mod_base = OTHER; note = 2'-O-methylguanosine-3'-phosphate
  modified_base 16: mod_base = OTHER; note = 2'-O-methyladenosine-3'-phosphate
  modified_base 17: mod_base = OTHER; note = 2'-O-methylguanosine-3'-phosphate
  modified_base 18: mod_base = OTHER; note = 2'-O-methyluridine-3'-phosphate
  modified_base 19: mod_base = OTHER; note = 2'-O-methyluridine-3'-phosphate
  modified_base 20: mod_base = OTHER; note = 2'-O-methyladenosine-3'-phosphate
  modified_base 21: mod_base = OTHER; note = 2'-O-methyluridine-3'-phosphate ((2S,4R)-1-[29-[[2-(acetylamino)-2-deoxy-beta-D-galactopyra nosyl]oxy]-14,14-bis[[3-[[3-[[5-[[2-(acetylamino)-2-deoxy-b eta-D-galactopyranosyl]oxy]-1-oxopentyl]amino]propyl]amino] -3-oxopropoxy]methyl]-1,12,19,25-tetraoxo-16-oxa-13,20,24-t riazanonacos-1-yl]-4-hydroxy-2-pyrrolidinyl)methyl ester
gaggccaccagtcagagttat

SEQ ID NO: 381 - RNA, 21 nt, synthetic construct
  source 1..21: mol_type = other RNA
  modified_base 1: mod_base = OTHER; note = 2'-O-methyladenosine-3'-phosphorothioate
  modified_base 2: mod_base = OTHER; note = 2'-O-methylcytidine-3'-phosphorothioate
  modified_base 3: mod_base = OTHER; note = 2'-O-methylcytidine-3'-phosphate
  modified_base 4: mod_base = OTHER; note = 2'-O-methyladenosine-3'-phosphate
  modified_base 5: mod_base = OTHER; note = 2'-O-methylguanosine-3'-phosphate
  modified_base 6: mod_base = OTHER; note = 2'-O-methyluridine-3'-phosphate
  modified_base 7: mod_base = OTHER; note = 2'-deoxy-2'-fluorocytidine-3'-phosphate
  modified_base 8: mod_base = OTHER; note = 2'-O-methyladenosine-3'-phosphate
  modified_base 9: mod_base = OTHER; note = 2'-deoxy-2'-fluoroguanosine-3'-phosphate
  modified_base 10: mod_base = OTHER; note = 2'-deoxy-2'-fluoroadenosine-3'-phosphate
  modified_base 11: mod_base = OTHER; note = 2'-deoxy-2'-fluoroguanosine-3'-phosphate
  modified_base 12: mod_base = OTHER; note = 2'-O-methyluridine-3'-phosphate
  modified_base 13: mod_base = OTHER; note = 2'-O-methyluridine-3'-phosphate
  modified_base 14: mod_base = OTHER; note = 2'-O-methyladenosine-3'-phosphate
  modified_base 15: mod_base = OTHER; note = 2'-O-methylcytidine-3'-phosphate
  modified_base 16: mod_base = OTHER; note = 2'-O-methyladenosine-3'-phosphate
  modified_base 17: mod_base = OTHER; note = 2'-O-methylguanosine-3'-phosphate
  modified_base 18: mod_base = OTHER; note = 2'-O-methylcytidine-3'-phosphate
  modified_base 19: mod_base = OTHER; note = 2'-O-methylcytidine-3'-phosphate
  modified_base 20: mod_base = OTHER; note = 2'-O-methylguanosine-3'-phosphate
  modified_base 21: mod_base = OTHER; note = 2'-O-methyluridine-3'-phosphate ((2S,4R)-1-[29-[[2-(acetylamino)-2-deoxy-beta-D-galactopyra nosyl]oxy]-14,14-bis[[3-[[3-[[5-[[2-(acetylamino)-2-deoxy-b eta-D-galactopyranosyl]oxy]-1-oxopentyl]amino]propyl]amino] -3-oxopropoxy]methyl]-1,12,19,25-tetraoxo-16-oxa-13,20,24-t riazanonacos-1-yl]-4-hydroxy-2-pyrrolidinyl)methyl ester
accagtcagagttacagccgt

SEQ ID NO: 382 - RNA, 21 nt, synthetic construct
  source 1..21: mol_type = other RNA
  modified_base 1: mod_base = OTHER; note = 2'-O-methyluridine-3'-phosphorothioate
  modified_base 2: mod_base = OTHER; note = 2'-O-methylcytidine-3'-phosphorothioate
  modified_base 3: mod_base = OTHER; note = 2'-O-methyladenosine-3'-phosphate
  modified_base 4: mod_base = OTHER; note = 2'-O-methylguanosine-3'-phosphate
  modified_base 5: mod_base = OTHER; note = 2'-O-methyladenosine-3'-phosphate
  modified_base 6: mod_base = OTHER; note = 2'-O-methylguanosine-3'-phosphate
  modified_base 7: mod_base = OTHER; note = 2'-deoxy-2'-fluorouridine-3'-phosphate
  modified_base 8: mod_base = OTHER; note = 2'-O-methyluridine-3'-phosphate
  modified_base 9: mod_base = OTHER; note = 2'-deoxy-2'-fluoroadenosine-3'-phosphate
  modified_base 10: mod_base = OTHER; note = 2'-deoxy-2'-fluorocytidine-3'-phosphate
  modified_base 11: mod_base = OTHER; note = 2'-deoxy-2'-fluoroadenosine-3'-phosphate
  modified_base 12: mod_base = OTHER; note = 2'-O-methylguanosine-3'-phosphate
  modified_base 13: mod_base = OTHER; note = 2'-O-methylcytidine-3'-phosphate
  modified_base 14: mod_base = OTHER; note = 2'-O-methylcytidine-3'-phosphate
  modified_base 15: mod_base = OTHER; note = 2'-O-methylguanosine-3'-phosphate
  modified_base 16: mod_base = OTHER; note = 2'-O-methylcytidine-3'-phosphate
  modified_base 17: mod_base = OTHER; note = 2'-O-methyluridine-3'-phosphate
  modified_base 18: mod_base = OTHER; note = 2'-O-methylguanosine-3'-phosphate
  modified_base 19: mod_base = OTHER; note = 2'-O-methylcytidine-3'-phosphate
  modified_base 20: mod_base = OTHER; note = 2'-O-methylcytidine-3'-phosphate
  modified_base 21: mod_base = OTHER; note = 2'-O-methyluridine-3'-phosphate ((2S,4R)-1-[29-[[2-(acetylamino)-2-deoxy-beta-D-galactopyra nosyl]oxy]-14,14-bis[[3-[[3-[[5-[[2-(acetylamino)-2-deoxy-b eta-D-galactopyranosyl]oxy]-1-oxopentyl]amino]propyl]amino] -3-oxopropoxy]methyl]-1,12,19,25-tetraoxo-16-oxa-13,20,24-t riazanonacos-1-yl]-4-hydroxy-2-pyrrolidinyl)methyl ester
tcagagttacagccgctgcct

SEQ ID NO: 383 - RNA, 21 nt, synthetic construct
  source 1..21: mol_type = other RNA
  modified_base 1: mod_base = OTHER; note = 2'-O-methylcytidine-3'-phosphorothioate
  modified_base 2: mod_base = OTHER; note = 2'-O-methyladenosine-3'-phosphorothioate
  modified_base 3: mod_base = OTHER; note = 2'-O-methylguanosine-3'-phosphate
  modified_base 4: mod_base = OTHER; note = 2'-O-methylcytidine-3'-phosphate
  modified_base 5: mod_base = OTHER; note = 2'-O-methylcytidine-3'-phosphate
  modified_base 6: mod_base = OTHER; note = 2'-O-methylguanosine-3'-phosphate
  modified_base 7: mod_base = OTHER; note = 2'-deoxy-2'-fluorocytidine-3'-phosphate
  modified_base 8: mod_base = OTHER; note = 2'-O-methyluridine-3'-phosphate
  modified_base 9: mod_base = OTHER; note = 2'-deoxy-2'-fluoroguanosine-3'-phosphate
  modified_base 10: mod_base = OTHER; note = 2'-deoxy-2'-fluorocytidine-3'-phosphate
  modified_base 11: mod_base = OTHER; note = 2'-deoxy-2'-fluorocytidine-3'-phosphate
  modified_base 12: mod_base = OTHER; note = 2'-O-methyluridine-3'-phosphate
  modified_base 13: mod_base = OTHER; note = 2'-O-methylguanosine-3'-phosphate
  modified_base 14: mod_base = OTHER; note = 2'-O-methylguanosine-3'-phosphate
  modified_base 15: mod_base = OTHER; note = 2'-O-methyladenosine-3'-phosphate
  modified_base 16: mod_base = OTHER; note = 2'-O-methyladenosine-3'-phosphate
  modified_base 17: mod_base = OTHER; note = 2'-O-methylcytidine-3'-phosphate
  modified_base 18: mod_base = OTHER; note = 2'-O-methyluridine-3'-phosphate
  modified_base 19: mod_base = OTHER; note = 2'-O-methylguanosine-3'-phosphate
  modified_base 20: mod_base = OTHER; note = 2'-O-methyladenosine-3'-phosphate
  modified_base 21: mod_base = OTHER; note = 2'-O-methyluridine-3'-phosphate ((2S,4R)-1-[29-[[2-(acetylamino)-2-deoxy-beta-D-galactopyra nosyl]oxy]-14,14-bis[[3-[[3-[[5-[[2-(acetylamino)-2-deoxy-b eta-D-galactopyranosyl]oxy]-1-oxopentyl]amino]propyl]amino] -3-oxopropoxy]methyl]-1,12,19,25-tetraoxo-16-oxa-13,20,24-t riazanonacos-1-yl]-4-hydroxy-2-pyrrolidinyl)methyl ester
cagccgctgcctggaactgat

SEQ ID NO: 384 - RNA, 21 nt, synthetic construct
  source 1..21: mol_type = other RNA
  modified_base 1: mod_base = OTHER; note = 2'-O-methylguanosine-3'-phosphorothioate
  modified_base 2: mod_base = OTHER; note = 2'-O-methylcytidine-3'-phosphorothioate
  modified_base 3: mod_base = OTHER; note = 2'-O-methyluridine-3'-phosphate
  modified_base 4: mod_base = OTHER; note = 2'-O-methylguanosine-3'-phosphate
  modified_base 5: mod_base = OTHER; note = 2'-O-methylcytidine-3'-phosphate
  modified_base 6: mod_base = OTHER; note = 2'-O-methylcytidine-3'-phosphate
  modified_base 7: mod_base = OTHER; note = 2'-deoxy-2'-fluorouridine-3'-phosphate
  modified_base 8: mod_base = OTHER; note = 2'-O-methylguanosine-3'-phosphate
  modified_base 9: mod_base = OTHER; note = 2'-deoxy-2'-fluoroguanosine-3'-phosphate
  modified_base 10: mod_base = OTHER; note = 2'-deoxy-2'-fluoroadenosine-3'-phosphate
  modified_base 11: mod_base = OTHER; note = 2'-deoxy-2'-fluoroadenosine-3'-phosphate
  modified_base 12: mod_base = OTHER; note = 2'-O-methylcytidine-3'-phosphate
  modified_base 13: mod_base = OTHER; note = 2'-O-methyluridine-3'-phosphate
  modified_base 14: mod_base = OTHER; note = 2'-O-methylguanosine-3'-phosphate
  modified_base 15: mod_base = OTHER; note = 2'-O-methyladenosine-3'-phosphate
  modified_base 16: mod_base = OTHER; note = 2'-O-methyluridine-3'-phosphate
  modified_base 17: mod_base = OTHER; note = 2'-O-methylguanosine-3'-phosphate
  modified_base 18: mod_base = OTHER; note = 2'-O-methylcytidine-3'-phosphate
  modified_base 19: mod_base = OTHER; note = 2'-O-methyluridine-3'-phosphate
  modified_base 20: mod_base = OTHER; note = 2'-O-methylguanosine-3'-phosphate
  modified_base 21: mod_base = OTHER; note = 2'-O-methyluridine-3'-phosphate ((2S,4R)-1-[29-[[2-(acetylamino)-2-deoxy-beta-D-galactopyra nosyl]oxy]-14,14-bis[[3-[[3-[[5-[[2-(acetylamino)-2-deoxy-b eta-D-galactopyranosyl]oxy]-1-oxopentyl]amino]propyl]amino] -3-oxopropoxy]methyl]-1,12,19,25-tetraoxo-16-oxa-13,20,24-t riazanonacos-1-yl]-4-hydroxy-2-pyrrolidinyl)methyl ester
gctgcctggaactgatgctgt

SEQ ID NO: 385 - RNA, 21 nt, synthetic construct
  source 1..21: mol_type = other RNA
  modified_base 1: mod_base = OTHER; note = 2'-O-methylguanosine-3'-phosphorothioate
  modified_base 2: mod_base = OTHER; note = 2'-O-methylguanosine-3'-phosphorothioate
  modified_base 3: mod_base = OTHER; note = 2'-O-methyladenosine-3'-phosphate
  modified_base 4: mod_base = OTHER; note = 2'-O-methyladenosine-3'-phosphate
  modified_base 5: mod_base = OTHER; note = 2'-O-methylcytidine-3'-phosphate
  modified_base 6: mod_base = OTHER; note = 2'-O-methyluridine-3'-phosphate
  modified_base 7: mod_base = OTHER; note = 2'-deoxy-2'-fluoroguanosine-3'-phosphate
  modified_base 8: mod_base = OTHER; note = 2'-O-methyladenosine-3'-phosphate
  modified_base 9: mod_base = OTHER; note = 2'-deoxy-2'-fluorouridine-3'-phosphate
  modified_base 10: mod_base = OTHER; note = 2'-deoxy-2'-fluoroguanosine-3'-phosphate
  modified_base 11: mod_base = OTHER; note = 2'-deoxy-2'-fluorocytidine-3'-phosphate
  modified_base 12: mod_base = OTHER; note = 2'-O-methyluridine-3'-phosphate
  modified_base 13: mod_base = OTHER; note = 2'-O-methylguanosine-3'-phosphate
  modified_base 14: mod_base = OTHER; note = 2'-O-methyladenosine-3'-phosphate
  modified_base 15: mod_base = OTHER; note = 2'-O-methylcytidine-3'-phosphate
  modified_base 16: mod_base = OTHER; note = 2'-O-methylguanosine-3'-phosphate
  modified_base 17: mod_base = OTHER; note = 2'-O-methylcytidine-3'-phosphate
  modified_base 18: mod_base = OTHER; note = 2'-O-methyladenosine-3'-phosphate
  modified_base 19: mod_base = OTHER; note = 2'-O-methylcytidine-3'-phosphate
  modified_base 20: mod_base = OTHER; note = 2'-O-methylguanosine-3'-phosphate
  modified_base 21: mod_base = OTHER; note = 2'-O-methyluridine-3'-phosphate ((2S,4R)-1-[29-[[2-(acetylamino)-2-deoxy-beta-D-galactopyra nosyl]oxy]-14,14-bis[[3-[[3-[[5-[[2-(acetylamino)-2-deoxy-b eta-D-galactopyranosyl]oxy]-1-oxopentyl]amino]propyl]amino] -3-oxopropoxy]methyl]-1,12,19,25-tetraoxo-16-oxa-13,20,24-t riazanonacos-1-yl]-4-hydroxy-2-pyrrolidinyl)methyl ester
ggaactgatgctgacgcacgt

SEQ ID NO: 386 - RNA, 21 nt, synthetic construct
  source 1..21: mol_type = other RNA
  modified_base 1: mod_base = OTHER; note = 2'-O-methyluridine-3'-phosphorothioate
  modified_base 2: mod_base = OTHER; note = 2'-O-methylguanosine-3'-phosphorothioate
  modified_base 3: mod_base = OTHER; note = 2'-O-methyladenosine-3'-phosphate
  modified_base 4: mod_base = OTHER; note = 2'-O-methyluridine-3'-phosphate
  modified_base 5: mod_base = OTHER; note = 2'-O-methylguanosine-3'-phosphate
  modified_base 6: mod_base = OTHER; note = 2'-O-methylcytidine-3'-phosphate
  modified_base 7: mod_base = OTHER; note = 2'-deoxy-2'-fluorouridine-3'-phosphate
  modified_base 8: mod_base = OTHER; note = 2'-O-methylguanosine-3'-phosphate
  modified_base 9: mod_base = OTHER; note = 2'-deoxy-2'-fluoroadenosine-3'-phosphate
  modified_base 10: mod_base = OTHER; note = 2'-deoxy-2'-fluorocytidine-3'-phosphate
  modified_base 11: mod_base = OTHER; note = 2'-deoxy-2'-fluoroguanosine-3'-phosphate
  modified_base 12: mod_base = OTHER; note = 2'-O-methylcytidine-3'-phosphate
  modified_base 13: mod_base = OTHER; note = 2'-O-methyladenosine-3'-phosphate
  modified_base 14: mod_base = OTHER; note = 2'-O-methylcytidine-3'-phosphate
  modified_base 15: mod_base = OTHER; note = 2'-O-methylguanosine-3'-phosphate
  modified_base 16: mod_base = OTHER; note = 2'-O-methyluridine-3'-phosphate
  modified_base 17: mod_base = OTHER; note = 2'-O-methylguanosine-3'-phosphate
  modified_base 18: mod_base = OTHER; note = 2'-O-methylguanosine-3'-phosphate
  modified_base 19: mod_base = OTHER; note = 2'-O-methylcytidine-3'-phosphate
  modified_base 20: mod_base = OTHER; note = 2'-O-methylcytidine-3'-phosphate
  modified_base 21: mod_base = OTHER; note = 2'-O-methyluridine-3'-phosphate ((2S,4R)-1-[29-[[2-(acetylamino)-2-deoxy-beta-D-galactopyra nosyl]oxy]-14,14-bis[[3-[[3-[[5-[[2-(acetylamino)-2-deoxy-b eta-D-galactopyranosyl]oxy]-1-oxopentyl]amino]propyl]amino] -3-oxopropoxy]methyl]-1,12,19,25-tetraoxo-16-oxa-13,20,24-t riazanonacos-1-yl]-4-hydroxy-2-pyrrolidinyl)methyl ester
tgatgctgacgcacgtggcct

SEQ ID NO: 387 - RNA, 21 nt, synthetic construct
  source 1..21: mol_type = other RNA
  modified_base 1: mod_base = OTHER; note = 2'-O-methylcytidine-3'-phosphorothioate
  modified_base 2: mod_base = OTHER; note = 2'-O-methyladenosine-3'-phosphorothioate
  modified_base 3: mod_base = OTHER; note = 2'-O-methyluridine-3'-phosphate
  modified_base 4: mod_base = OTHER; note = 2'-O-methylguanosine-3'-phosphate
  modified_base 5: mod_base = OTHER; note = 2'-O-methyluridine-3'-phosphate
  modified_base 6: mod_base = OTHER; note = 2'-O-methylguanosine-3'-phosphate
  modified_base 7: mod_base = OTHER; note = 2'-deoxy-2'-fluorocytidine-3'-phosphate
  modified_base 8: mod_base = OTHER; note = 2'-O-methylcytidine-3'-phosphate
  modified_base 9: mod_base = OTHER; note = 2'-deoxy-2'-fluoroadenosine-3'-phosphate
  modified_base 10: mod_base = OTHER; note = 2'-deoxy-2'-fluorocytidine-3'-phosphate
  modified_base 11: mod_base = OTHER; note = 2'-deoxy-2'-fluorocytidine-3'-phosphate
  modified_base 12: mod_base = OTHER; note = 2'-O-methyluridine-3'-phosphate
  modified_base 13: mod_base = OTHER; note = 2'-O-methylcytidine-3'-phosphate
  modified_base 14: mod_base = OTHER; note = 2'-O-methyladenosine-3'-phosphate
  modified_base 15: mod_base = OTHER; note = 2'-O-methyluridine-3'-phosphate
  modified_base 16: mod_base = OTHER; note = 2'-O-methylguanosine-3'-phosphate
  modified_base 17: mod_base = OTHER; note = 2'-O-methylguanosine-3'-phosphate
  modified_base 18: mod_base = OTHER; note = 2'-O-methyluridine-3'-phosphate
  modified_base 19: mod_base = OTHER; note = 2'-O-methylguanosine-3'-phosphate
  modified_base 20: mod_base = OTHER; note = 2'-O-methylguanosine-3'-phosphate
  modified_base 21: mod_base = OTHER; note = 2'-O-methyluridine-3'-phosphate ((2S,4R)-1-[29-[[2-(acetylamino)-2-deoxy-beta-D-galactopyra nosyl]oxy]-14,14-bis[[3-[[3-[[5-[[2-(acetylamino)-2-deoxy-b eta-D-galactopyranosyl]oxy]-1-oxopentyl]amino]propyl]amino] -3-oxopropoxy]methyl]-1,12,19,25-tetraoxo-16-oxa-13,20,24-t riazanonacos-1-yl]-4-hydroxy-2-pyrrolidinyl)methyl ester
catgtgccacctcatggtggt

SEQ ID NO: 388 - RNA, 21 nt, synthetic construct
  source 1..21: mol_type = other RNA
  modified_base 1: mod_base = OTHER; note = 2'-O-methylcytidine-3'-phosphorothioate
  modified_base 2: mod_base = OTHER; note = 2'-O-methyluridine-3'-phosphorothioate
  modified_base 3: mod_base = OTHER; note = 2'-O-methylcytidine-3'-phosphate
  modified_base 4: mod_base = OTHER; note = 2'-O-methyladenosine-3'-phosphate
  modified_base 5: mod_base = OTHER; note = 2'-O-methyluridine-3'-phosphate
  modified_base 6: mod_base = OTHER; note = 2'-O-methylguanosine-3'-phosphate
  modified_base 7: mod_base = OTHER; note = 2'-deoxy-2'-fluoroguanosine-3'-phosphate
  modified_base 8: mod_base = OTHER; note = 2'-O-methyluridine-3'-phosphate
  modified_base 9: mod_base = OTHER; note = 2'-deoxy-2'-fluoroguanosine-3'-phosphate
  modified_base 10: mod_base = OTHER; note = 2'-deoxy-2'-fluoroguanosine-3'-phosphate
  modified_base 11: mod_base = OTHER; note = 2'-deoxy-2'-fluorocytidine-3'-phosphate
  modified_base 12: mod_base = OTHER; note = 2'-O-methyluridine-3'-phosphate
  modified_base 13: mod_base = OTHER; note = 2'-O-methyluridine-3'-phosphate
  modified_base 14: mod_base = OTHER; note = 2'-O-methylcytidine-3'-phosphate
  modified_base 15: mod_base = OTHER; note = 2'-O-methylcytidine-3'-phosphate
  modified_base 16: mod_base = OTHER; note = 2'-O-methylcytidine-3'-phosphate
  modified_base 17: mod_base = OTHER; note = 2'-O-methyladenosine-3'-phosphate
  modified_base 18: mod_base = OTHER; note = 2'-O-methylcytidine-3'-phosphate
  modified_base 19: mod_base = OTHER; note = 2'-O-methyladenosine-3'-phosphate
  modified_base 20: mod_base = OTHER; note = 2'-O-methyladenosine-3'-phosphate
  modified_base 21: mod_base = OTHER; note = 2'-O-methyluridine-3'-phosphate ((2S,4R)-1-[29-[[2-(acetylamino)-2-deoxy-beta-D-galactopyra nosyl]oxy]-14,14-bis[[3-[[3-[[5-[[2-(acetylamino)-2-deoxy-b eta-D-galactopyranosyl]oxy]-1-oxopentyl]amino]propyl]amino] -3-oxopropoxy]methyl]-1,12,19,25-tetraoxo-16-oxa-13,20,24-t riazanonacos-1-yl]-4-hydroxy-2-pyrrolidinyl)methyl ester
ctcatggtggcttcccacaat

SEQ ID NO: 389 - RNA, 21 nt, synthetic construct
  source 1..21: mol_type = other RNA
  modified_base 1: mod_base = OTHER; note = 2'-O-methylguanosine-3'-phosphorothioate
  modified_base 2: mod_base = OTHER; note = 2'-O-methylguanosine-3'-phosphorothioate
  modified_base 3: mod_base = OTHER; note = 2'-O-methylcytidine-3'-phosphate
  modified_base 4: mod_base = OTHER; note = 2'-O-methyluridine-3'-phosphate
  modified_base 5: mod_base = OTHER; note = 2'-O-methyluridine-3'-phosphate
  modified_base 6: mod_base = OTHER; note = 2'-O-methylcytidine-3'-phosphate
  modified_base 7: mod_base = OTHER; note = 2'-deoxy-2'-fluorocytidine-3'-phosphate
  modified_base 8: mod_base = OTHER; note = 2'-O-methylcytidine-3'-phosphate
  modified_base 9: mod_base = OTHER; note = 2'-deoxy-2'-fluoroadenosine-3'-phosphate
  modified_base 10: mod_base = OTHER; note = 2'-deoxy-2'-fluorocytidine-3'-phosphate
  modified_base 11: mod_base = OTHER; note = 2'-deoxy-2'-fluoroadenosine-3'-phosphate
  modified_base 12: mod_base = OTHER; note = 2'-O-methyladenosine-3'-phosphate
  modified_base 13: mod_base = OTHER; note = 2'-O-methyluridine-3'-phosphate
  modified_base 14: mod_base = OTHER; note = 2'-O-methylguanosine-3'-phosphate
  modified_base 15: mod_base = OTHER; note = 2'-O-methyladenosine-3'-phosphate
  modified_base 16: mod_base = OTHER; note = 2'-O-methylguanosine-3'-phosphate
  modified_base 17: mod_base = OTHER; note = 2'-O-methylguanosine-3'-phosphate
  modified_base 18: mod_base = OTHER; note = 2'-O-methyladenosine-3'-phosphate
  modified_base 19: mod_base = OTHER; note = 2'-O-methyladenosine-3'-phosphate
  modified_base 20: mod_base = OTHER; note = 2'-O-methyluridine-3'-phosphate
  modified_base 21: mod_base = OTHER; note = 2'-O-methyluridine-3'-phosphate ((2S,4R)-1-[29-[[2-(acetylamino)-2-deoxy-beta-D-galactopyra nosyl]oxy]-14,14-bis[[3-[[3-[[5-[[2-(acetylamino)-2-deoxy-b eta-D-galactopyranosyl]oxy]-1-oxopentyl]amino]propyl]amino] -3-oxopropoxy]methyl]-1,12,19,25-tetraoxo-16-oxa-13,20,24-t riazanonacos-1-yl]-4-hydroxy-2-pyrrolidinyl)methyl ester
ggcttcccacaatgaggaatt

SEQ ID NO: 390 - RNA, 21 nt, synthetic construct
  source 1..21: mol_type = other RNA
  modified_base 1: mod_base = OTHER; note = 2'-O-methylcytidine-3'-phosphorothioate
  modified_base 2: mod_base = OTHER; note = 2'-O-methylcytidine-3'-phosphorothioate
  modified_base 3: mod_base = OTHER; note = 2'-O-methylcytidine-3'-phosphate
  modified_base 4: mod_base = OTHER; note = 2'-O-methyladenosine-3'-phosphate
  modified_base 5: mod_base = OTHER; note = 2'-O-methylcytidine-3'-phosphate
  modified_base 6: mod_base = OTHER; note = 2'-O-methyladenosine-3'-phosphate
  modified_base 7: mod_base = OTHER; note = 2'-deoxy-2'-fluoroadenosine-3'-phosphate
  modified_base 8: mod_base = OTHER; note = 2'-O-methyluridine-3'-phosphate
  modified_base 9: mod_base = OTHER; note = 2'-deoxy-2'-fluoroguanosine-3'-phosphate
  modified_base 10: mod_base = OTHER; note = 2'-deoxy-2'-fluoroadenosine-3'-phosphate
  modified_base 11: mod_base = OTHER; note = 2'-deoxy-2'-fluoroguanosine-3'-phosphate
  modified_base 12: mod_base = OTHER; note = 2'-O-methylguanosine-3'-phosphate
  modified_base 13: mod_base = OTHER; note = 2'-O-methyladenosine-3'-phosphate
  modified_base 14: mod_base = OTHER; note = 2'-O-methyladenosine-3'-phosphate
  modified_base 15: mod_base = OTHER; note = 2'-O-methyluridine-3'-phosphate
  modified_base 16: mod_base = OTHER; note = 2'-O-methylcytidine-3'-phosphate
  modified_base 17: mod_base = OTHER; note = 2'-O-methyluridine-3'-phosphate
  modified_base 18: mod_base = OTHER; note = 2'-O-methylguanosine-3'-phosphate
  modified_base 19: mod_base = OTHER; note = 2'-O-methyluridine-3'-phosphate
  modified_base 20: mod_base = OTHER; note = 2'-O-methyluridine-3'-phosphate
  modified_base 21: mod_base = OTHER; note = 2'-O-methyluridine-3'-phosphate ((2S,4R)-1-[29-[[2-(acetylamino)-2-deoxy-beta-D-galactopyra nosyl]oxy]-14,14-bis[[3-[[3-[[5-[[2-(acetylamino)-2-deoxy-b eta-D-galactopyranosyl]oxy]-1-oxopentyl]amino]propyl]amino] -3-oxopropoxy]methyl]-1,12,19,25-tetraoxo-16-oxa-13,20,24-t riazanonacos-1-yl]-4-hydroxy-2-pyrrolidinyl)methyl ester
cccacaatgaggaatctgttt

SEQ ID NO: 391 - RNA, 21 nt, synthetic construct
  source 1..21: mol_type = other RNA
  modified_base 1: mod_base = OTHER; note = 2'-O-methyladenosine-3'-phosphorothioate
  modified_base 2: mod_base = OTHER; note = 2'-O-methyladenosine-3'-phosphorothioate
  modified_base 3: mod_base = OTHER; note = 2'-O-methyluridine-3'-phosphate
  modified_base 4: mod_base = OTHER; note = 2'-O-methylguanosine-3'-phosphate
  modified_base 5: mod_base = OTHER; note = 2'-O-methyladenosine-3'-phosphate
  modified_base 6: mod_base = OTHER; note = 2'-O-methylguanosine-3'-phosphate
  modified_base 7: mod_base = OTHER; note = 2'-deoxy-2'-fluoroguanosine-3'-phosphate
  modified_base 8: mod_base = OTHER; note = 2'-O-methyladenosine-3'-phosphate
  modified_base 9: mod_base = OTHER; note = 2'-deoxy-2'-fluoroadenosine-3'-phosphate
  modified_base 10: mod_base = OTHER; note = 2'-deoxy-2'-fluorouridine-3'-phosphate
  modified_base 11: mod_base = OTHER; note = 2'-deoxy-2'-fluorocytidine-3'-phosphate
  modified_base 12: mod_base = OTHER; note = 2'-O-methyluridine-3'-phosphate
  modified_base 13: mod_base = OTHER; note = 2'-O-methylguanosine-3'-phosphate
  modified_base 14: mod_base = OTHER; note = 2'-O-methyluridine-3'-phosphate
  modified_base 15: mod_base = OTHER; note = 2'-O-methyluridine-3'-phosphate
  modified_base 16: mod_base = OTHER; note = 2'-O-methylcytidine-3'-phosphate
  modified_base 17: mod_base = OTHER; note = 2'-O-methylguanosine-3'-phosphate
  modified_base 18: mod_base = OTHER; note = 2'-O-methylcytidine-3'-phosphate
  modified_base 19: mod_base = OTHER; note = 2'-O-methylcytidine-3'-phosphate
  modified_base 20: mod_base = OTHER; note = 2'-O-methyladenosine-3'-phosphate
  modified_base 21: mod_base = OTHER; note = 2'-O-methyluridine-3'-phosphate ((2S,4R)-1-[29-[[2-(acetylamino)-2-deoxy-beta-D-galactopyra nosyl]oxy]-14,14-bis[[3-[[3-[[5-[[2-(acetylamino)-2-deoxy-b eta-D-galactopyranosyl]oxy]-1-oxopentyl]amino]propyl]amino] -3-oxopropoxy]methyl]-1,12,19,25-tetraoxo-16-oxa-13,20,24-t riazanonacos-1-yl]-4-hydroxy-2-pyrrolidinyl)methyl ester
aatgaggaatctgttcgccat

SEQ ID NO: 392 - RNA, 21 nt, synthetic construct
  source 1..21: mol_type = other RNA
  modified_base 1: mod_base = OTHER; note = 2'-O-methyluridine-3'-phosphorothioate
  modified_base 2: mod_base = OTHER; note = 2'-O-methylcytidine-3'-phosphorothioate
  modified_base 3: mod_base = OTHER; note = 2'-O-methyluridine-3'-phosphate
  modified_base 4: mod_base = OTHER; note = 2'-O-methylguanosine-3'-phosphate
  modified_base 5: mod_base = OTHER; note = 2'-O-methyluridine-3'-phosphate
  modified_base 6: mod_base = OTHER; note = 2'-O-methyluridine-3'-phosphate
  modified_base 7: mod_base = OTHER; note = 2'-deoxy-2'-fluorocytidine-3'-phosphate
  modified_base 8: mod_base = OTHER; note = 2'-O-methylguanosine-3'-phosphate
  modified_base 9: mod_base = OTHER; note = 2'-deoxy-2'-fluorocytidine-3'-phosphate
  modified_base 10: mod_base = OTHER; note = 2'-deoxy-2'-fluorocytidine-3'-phosphate
  modified_base 11: mod_base = OTHER; note = 2'-deoxy-2'-fluoroadenosine-3'-phosphate
  modified_base 12: mod_base = OTHER; note = 2'-O-methylguanosine-3'-phosphate
  modified_base 13: mod_base = OTHER; note = 2'-O-methylguanosine-3'-phosphate
  modified_base 14: mod_base = OTHER; note = 2'-O-methylcytidine-3'-phosphate
  modified_base 15: mod_base = OTHER; note = 2'-O-methyladenosine-3'-phosphate
  modified_base 16: mod_base = OTHER; note = 2'-O-methyladenosine-3'-phosphate
  modified_base 17: mod_base = OTHER; note = 2'-O-methylcytidine-3'-phosphate
  modified_base 18: mod_base = OTHER; note = 2'-O-methylcytidine-3'-phosphate
  modified_base 19: mod_base = OTHER; note = 2'-O-methyladenosine-3'-phosphate
  modified_base 20: mod_base = OTHER; note = 2'-O-methyladenosine-3'-phosphate
  modified_base 21: mod_base = OTHER; note = 2'-O-methyluridine-3'-phosphate ((2S,4R)-1-[29-[[2-(acetylamino)-2-deoxy-beta-D-galactopyra nosyl]oxy]-14,14-bis[[3-[[3-[[5-[[2-(acetylamino)-2-deoxy-b eta-D-galactopyranosyl]oxy]-1-oxopentyl]amino]propyl]amino] -3-oxopropoxy]methyl]-1,12,19,25-tetraoxo-16-oxa-13,20,24-t riazanonacos-1-yl]-4-hydroxy-2-pyrrolidinyl)methyl ester
tctgttcgccaggcaaccaat

SEQ ID NO: 393 - RNA, 21 nt, synthetic construct
  source 1..21: mol_type = other RNA
  modified_base 1: mod_base = OTHER; note = 2'-O-methyluridine-3'-phosphorothioate
  modified_base 2: mod_base = OTHER; note = 2'-O-methylcytidine-3'-phosphorothioate
  modified_base 3: mod_base = OTHER; note = 2'-O-methylguanosine-3'-phosphate
  modified_base 4: mod_base = OTHER; note = 2'-O-methylcytidine-3'-phosphate
  modified_base 5: mod_base = OTHER; note = 2'-O-methylcytidine-3'-phosphate
  modified_base 6: mod_base = OTHER; note = 2'-O-methyladenosine-3'-phosphate
  modified_base 7: mod_base = OTHER; note = 2'-deoxy-2'-fluoroguanosine-3'-phosphate
  modified_base 8: mod_base = OTHER; note = 2'-O-methylguanosine-3'-phosphate
  modified_base 9: mod_base = OTHER; note = 2'-deoxy-2'-fluorocytidine-3'-phosphate
  modified_base 10: mod_base = OTHER; note = 2'-deoxy-2'-fluoroadenosine-3'-phosphate
  modified_base 11: mod_base = OTHER; note = 2'-deoxy-2'-fluoroadenosine-3'-phosphate
  modified_base 12: mod_base = OTHER; note = 2'-O-methylcytidine-3'-phosphate
  modified_base 13: mod_base = OTHER; note = 2'-O-methylcytidine-3'-phosphate
  modified_base 14: mod_base = OTHER; note = 2'-O-methyladenosine-3'-phosphate
  modified_base 15: mod_base = OTHER; note = 2'-O-methyladenosine-3'-phosphate
  modified_base 16: mod_base = OTHER; note = 2'-O-methylguanosine-3'-phosphate
  modified_base 17: mod_base = OTHER; note = 2'-O-methylcytidine-3'-phosphate
  modified_base 18: mod_base = OTHER; note = 2'-O-methylguanosine-3'-phosphate
  modified_base 19: mod_base = OTHER; note = 2'-O-methylcytidine-3'-phosphate
  modified_base 20: mod_base = OTHER; note = 2'-O-methyladenosine-3'-phosphate
  modified_base 21: mod_base = OTHER; note = 2'-O-methyluridine-3'-phosphate ((2S,4R)-1-[29-[[2-(acetylamino)-2-deoxy-beta-D-galactopyra nosyl]oxy]-14,14-bis[[3-[[3-[[5-[[2-(acetylamino)-2-deoxy-b eta-D-galactopyranosyl]oxy]-1-oxopentyl]amino]propyl]amino] -3-oxopropoxy]methyl]-1,12,19,25-tetraoxo-16-oxa-13,20,24-t riazanonacos-1-yl]-4-hydroxy-2-pyrrolidinyl)methyl ester
tcgccaggcaaccaagcgcat

SEQ ID NO: 394 - RNA, 21 nt, synthetic construct
  source 1..21: mol_type = other RNA
  modified_base 1: mod_base = OTHER; note = 2'-O-methylguanosine-3'-phosphorothioate
  modified_base 2: mod_base = OTHER; note = 2'-O-methylcytidine-3'-phosphorothioate
  modified_base 3: mod_base = OTHER; note = 2'-O-methyladenosine-3'-phosphate
  modified_base 4: mod_base = OTHER; note = 2'-O-methyladenosine-3'-phosphate
  modified_base 5: mod_base = OTHER; note = 2'-O-methylcytidine-3'-phosphate
  modified_base 6: mod_base = OTHER; note = 2'-O-methylcytidine-3'-phosphate
  modified_base 7: mod_base = OTHER; note = 2'-deoxy-2'-fluoroadenosine-3'-phosphate
  modified_base 8: mod_base = OTHER; note = 2'-O-methyladenosine-3'-phosphate
  modified_base 9: mod_base = OTHER; note = 2'-deoxy-2'-fluoroguanosine-3'-phosphate
  modified_base 10: mod_base = OTHER; note = 2'-deoxy-2'-fluorocytidine-3'-phosphate
  modified_base 11: mod_base = OTHER; note = 2'-deoxy-2'-fluoroguanosine-3'-phosphate
  modified_base 12: mod_base = OTHER; note = 2'-O-methylcytidine-3'-phosphate
  modified_base 13: mod_base = OTHER; note = 2'-O-methyladenosine-3'-phosphate
  modified_base 14: mod_base = OTHER; note = 2'-O-methyluridine-3'-phosphate
  modified_base 15: mod_base = OTHER; note = 2'-O-methylguanosine-3'-phosphate
  modified_base 16: mod_base = OTHER; note = 2'-O-methyluridine-3'-phosphate
  modified_base 17: mod_base = OTHER; note = 2'-O-methylguanosine-3'-phosphate
  modified_base 18: mod_base = OTHER; note = 2'-O-methylguanosine-3'-phosphate
  modified_base 19: mod_base = OTHER; note = 2'-O-methylguanosine-3'-phosphate
  modified_base 20: mod_base = OTHER; note = 2'-O-methyladenosine-3'-phosphate
  modified_base 21: mod_base = OTHER; note = 2'-O-methyluridine-3'-phosphate ((2S,4R)-1-[29-[[2-(acetylamino)-2-deoxy-beta-D-galactopyra nosyl]oxy]-14,14-bis[[3-[[3-[[5-[[2-(acetylamino)-2-deoxy-b eta-D-galactopyranosyl]oxy]-1-oxopentyl]amino]propyl]amino] -3-oxopropoxy]methyl]-1,12,19,25-tetraoxo-16-oxa-13,20,24-t riazanonacos-1-yl]-4-hydroxy-2-pyrrolidinyl)methyl ester
gcaaccaagcgcatgtgggat

SEQ ID NO: 395 - RNA, 21 nt, synthetic construct
  source 1..21: mol_type = other RNA
  modified_base 1: mod_base = OTHER; note = 2'-O-methylcytidine-3'-phosphorothioate
  modified_base 2: mod_base = OTHER; note = 2'-O-methyladenosine-3'-phosphorothioate
  modified_base 3: mod_base = OTHER; note = 2'-O-methyladenosine-3'-phosphate
  modified_base 4: mod_base = OTHER; note = 2'-O-methylguanosine-3'-phosphate
  modified_base 5: mod_base = OTHER; note = 2'-O-methylcytidine-3'-phosphate
  modified_base 6: mod_base = OTHER; note = 2'-O-methylguanosine-3'-phosphate
  modified_base 7: mod_base = OTHER; note = 2'-deoxy-2'-fluorocytidine-3'-phosphate
  modified_base 8: mod_base = OTHER; note = 2'-O-methyladenosine-3'-phosphate
  modified_base 9: mod_base = OTHER; note = 2'-deoxy-2'-fluorouridine-3'-phosphate
  modified_base 10: mod_base = OTHER; note = 2'-deoxy-2'-fluoroguanosine-3'-phosphate
  modified_base 11: mod_base = OTHER; note = 2'-deoxy-2'-fluorouridine-3'-phosphate
  modified_base 12: mod_base = OTHER; note = 2'-O-methylguanosine-3'-phosphate
  modified_base 13: mod_base = OTHER; note = 2'-O-methylguanosine-3'-phosphate
  modified_base 14: mod_base = OTHER; note = 2'-O-methylguanosine-3'-phosphate
  modified_base 15: mod_base = OTHER; note = 2'-O-methyladenosine-3'-phosphate
  modified_base 16: mod_base = OTHER; note = 2'-O-methylguanosine-3'-phosphate
  modified_base 17: mod_base = OTHER; note = 2'-O-methylcytidine-3'-phosphate
  modified_base 18: mod_base = OTHER; note = 2'-O-methyluridine-3'-phosphate
  modified_base 19: mod_base = OTHER; note = 2'-O-methylguanosine-3'-phosphate
  modified_base 20: mod_base = OTHER; note = 2'-O-methylguanosine-3'-phosphate
  modified_base 21: mod_base = OTHER; note = 2'-O-methyluridine-3'-phosphate ((2S,4R)-1-[29-[[2-(acetylamino)-2-deoxy-beta-D-galactopyra nosyl]oxy]-14,14-bis[[3-[[3-[[5-[[2-(acetylamino)-2-deoxy-b eta-D-galactopyranosyl]oxy]-1-oxopentyl]amino]propyl]amino] -3-oxopropoxy]methyl]-1,12,19,25-tetraoxo-16-oxa-13,20,24-t riazanonacos-1-yl]-4-hydroxy-2-pyrrolidinyl)methyl ester
caagcgcatgtgggagctggt

SEQ ID NO: 396 - RNA, 21 nt, synthetic construct
  source 1..21: mol_type = other RNA
  modified_base 1: mod_base = OTHER; note = 2'-O-methylguanosine-3'-phosphorothioate
  modified_base 2: mod_base = OTHER; note = 2'-O-methylcytidine-3'-phosphorothioate
  modified_base 3: mod_base = OTHER; note = 2'-O-methyladenosine-3'-phosphate
  modified_base 4: mod_base = OTHER; note = 2'-O-methyluridine-3'-phosphate
  modified_base 5: mod_base = OTHER; note = 2'-O-methylguanosine-3'-phosphate
  modified_base 6: mod_base = OTHER; note = 2'-O-methyluridine-3'-phosphate
  modified_base 7: mod_base = OTHER; note = 2'-deoxy-2'-fluoroguanosine-3'-phosphate
  modified_base 8: mod_base = OTHER; note = 2'-O-methylguanosine-3'-phosphate
  modified_base 9: mod_base = OTHER; note = 2'-deoxy-2'-fluoroguanosine-3'-phosphate
  modified_base 10: mod_base = OTHER; note = 2'-deoxy-2'-fluoroadenosine-3'-phosphate
  modified_base 11: mod_base = OTHER; note = 2'-deoxy-2'-fluoroguanosine-3'-phosphate
  modified_base 12: mod_base = OTHER; note = 2'-O-methylcytidine-3'-phosphate
  modified_base 13: mod_base = OTHER; note = 2'-O-methyluridine-3'-phosphate
  modified_base 14: mod_base = OTHER; note = 2'-O-methylguanosine-3'-phosphate
  modified_base 15: mod_base = OTHER; note = 2'-O-methylguanosine-3'-phosphate
  modified_base 16: mod_base = OTHER; note = 2'-O-methylguanosine-3'-phosphate
  modified_base 17: mod_base = OTHER; note = 2'-O-methylcytidine-3'-phosphate
  modified_base 18: mod_base = OTHER; note = 2'-O-methyladenosine-3'-phosphate
  modified_base 19: mod_base = OTHER; note = 2'-O-methyluridine-3'-phosphate
  modified_base 20: mod_base = OTHER; note = 2'-O-methyluridine-3'-phosphate
  modified_base 21: mod_base = OTHER; note = 2'-O-methyluridine-3'-phosphate ((2S,4R)-1-[29-[[2-(acetylamino)-2-deoxy-beta-D-galactopyra nosyl]oxy]-14,14-bis[[3-[[3-[[5-[[2-(acetylamino)-2-deoxy-b eta-D-galactopyranosyl]oxy]-1-oxopentyl]amino]propyl]amino] -3-oxopropoxy]methyl]-1,12,19,25-tetraoxo-16-oxa-13,20,24-t riazanonacos-1-yl]-4-hydroxy-2-pyrrolidinyl)methyl ester
gcatgtgggagctgggcattt

SEQ ID NO: 397 - RNA, 21 nt, synthetic construct
  source 1..21: mol_type = other RNA
  modified_base 1: mod_base = OTHER; note = 2'-O-methyluridine-3'-phosphorothioate
  modified_base 2: mod_base = OTHER; note = 2'-O-methylguanosine-3'-phosphorothioate
  modified_base 3: mod_base = OTHER; note = 2'-O-methylguanosine-3'-phosphate
  modified_base 4: mod_base = OTHER; note = 2'-O-methylguanosine-3'-phosphate
  modified_base 5: mod_base = OTHER; note = 2'-O-methyladenosine-3'-phosphate
  modified_base 6: mod_base = OTHER; note = 2'-O-methylguanosine-3'-phosphate
  modified_base 7: mod_base = OTHER; note = 2'-deoxy-2'-fluorocytidine-3'-phosphate
  modified_base 8: mod_base = OTHER; note = 2'-O-methyluridine-3'-phosphate
  modified_base 9: mod_base = OTHER; note = 2'-deoxy-2'-fluoroguanosine-3'-phosphate
  modified_base 10: mod_base = OTHER; note = 2'-deoxy-2'-fluoroguanosine-3'-phosphate
  modified_base 11: mod_base = OTHER; note = 2'-deoxy-2'-fluoroguanosine-3'-phosphate
  modified_base 12: mod_base = OTHER; note = 2'-O-methylcytidine-3'-phosphate
  modified_base 13: mod_base = OTHER; note = 2'-O-methyladenosine-3'-phosphate
  modified_base 14: mod_base = OTHER; note = 2'-O-methyluridine-3'-phosphate
  modified_base 15: mod_base = OTHER; note = 2'-O-methyluridine-3'-phosphate
  modified_base 16: mod_base = OTHER; note = 2'-O-methylcytidine-3'-phosphate
  modified_base 17: mod_base = OTHER; note = 2'-O-methylcytidine-3'-phosphate
  modified_base 18: mod_base = OTHER; note = 2'-O-methyluridine-3'-phosphate
  modified_base 19: mod_base = OTHER; note = 2'-O-methylcytidine-3'-phosphate
  modified_base 20: mod_base = OTHER; note = 2'-O-methyluridine-3'-phosphate
  modified_base 21: mod_base = OTHER; note = 2'-O-methyluridine-3'-phosphate ((2S,4R)-1-[29-[[2-(acetylamino)-2-deoxy-beta-D-galactopyra nosyl]oxy]-14,14-bis[[3-[[3-[[5-[[2-(acetylamino)-2-deoxy-b eta-D-galactopyranosyl]oxy]-1-oxopentyl]amino]propyl]amino] -3-oxopropoxy]methyl]-1,12,19,25-tetraoxo-16-oxa-13,20,24-t riazanonacos-1-yl]-4-hydroxy-2-pyrrolidinyl)methyl ester
tgggagctgggcattcctctt

SEQ ID NO: 398 - RNA, 21 nt, synthetic construct
  source 1..21: mol_type = other RNA
  modified_base 1: mod_base = OTHER; note = 2'-O-methylguanosine-3'-phosphorothioate
  modified_base 2: mod_base = OTHER; note = 2'-O-methylguanosine-3'-phosphorothioate
  modified_base 3: mod_base = OTHER; note = 2'-O-methylguanosine-3'-phosphate
  modified_base 4: mod_base = OTHER; note = 2'-O-methylcytidine-3'-phosphate
  modified_base 5: mod_base = OTHER; note = 2'-O-methyladenosine-3'-phosphate
  modified_base 6: mod_base = OTHER; note = 2'-O-methyluridine-3'-phosphate
  modified_base 7: mod_base = OTHER; note = 2'-deoxy-2'-fluorouridine-3'-phosphate
  modified_base 8: mod_base = OTHER; note = 2'-O-methylcytidine-3'-phosphate
  modified_base 9: mod_base = OTHER; note = 2'-deoxy-2'-fluorocytidine-3'-phosphate
  modified_base 10: mod_base = OTHER; note = 2'-deoxy-2'-fluorouridine-3'-phosphate
  modified_base 11: mod_base = OTHER; note = 2'-deoxy-2'-fluorocytidine-3'-phosphate
  modified_base 12: mod_base = OTHER; note = 2'-O-methyluridine-3'-phosphate
  modified_base 13: mod_base = OTHER; note = 2'-O-methylguanosine-3'-phosphate
  modified_base 14: mod_base = OTHER; note = 2'-O-methylguanosine-3'-phosphate
  modified_base 15: mod_base = OTHER; note = 2'-O-methyladenosine-3'-phosphate
  modified_base 16: mod_base = OTHER; note = 2'-O-methyluridine-3'-phosphate
  modified_base 17: mod_base = OTHER; note = 2'-O-methylguanosine-3'-phosphate
  modified_base 18: mod_base = OTHER; note = 2'-O-methylguanosine-3'-phosphate
  modified_base 19: mod_base = OTHER; note = 2'-O-methylguanosine-3'-phosphate
  modified_base 20: mod_base = OTHER; note = 2'-O-methyladenosine-3'-phosphate
  modified_base 21: mod_base = OTHER; note = 2'-O-methyluridine-3'-phosphate ((2S,4R)-1-[29-[[2-(acetylamino)-2-deoxy-beta-D-galactopyra nosyl]oxy]-14,14-bis[[3-[[3-[[5-[[2-(acetylamino)-2-deoxy-b eta-D-galactopyranosyl]oxy]-1-oxopentyl]amino]propyl]amino] -3-oxopropoxy]methyl]-1,12,19,25-tetraoxo-16-oxa-13,20,24-t riazanonacos-1-yl]-4-hydroxy-2-pyrrolidinyl)methyl ester
gggcattcctctggatgggat

SEQ ID NO: 399 - RNA, 21 nt, synthetic construct
  source 1..21: mol_type = other RNA
  modified_base 1: mod_base = OTHER; note = 2'-O-methyluridine-3'-phosphorothioate
  modified_base 2: mod_base = OTHER; note = 2'-O-methyluridine-3'-phosphorothioate
  modified_base 3: mod_base = OTHER; note = 2'-O-methylcytidine-3'-phosphate
  modified_base 4: mod_base = OTHER; note = 2'-O-methylcytidine-3'-phosphate
  modified_base 5: mod_base = OTHER; note = 2'-O-methyluridine-3'-phosphate
  modified_base 6: mod_base = OTHER; note = 2'-O-methylcytidine-3'-phosphate
  modified_base 7: mod_base = OTHER; note = 2'-deoxy-2'-fluorouridine-3'-phosphate
  modified_base 8: mod_base = OTHER; note = 2'-O-methylguanosine-3'-phosphate
  modified_base 9: mod_base = OTHER; note = 2'-deoxy-2'-fluoroguanosine-3'-phosphate
  modified_base 10: mod_base = OTHER; note = 2'-deoxy-2'-fluoroadenosine-3'-phosphate
  modified_base 11: mod_base = OTHER; note = 2'-deoxy-2'-fluorouridine-3'-phosphate
  modified_base 12: mod_base = OTHER; note = 2'-O-methylguanosine-3'-phosphate
  modified_base 13: mod_base = OTHER; note = 2'-O-methylguanosine-3'-phosphate
  modified_base 14: mod_base = OTHER; note = 2'-O-methylguanosine-3'-phosphate
  modified_base 15: mod_base = OTHER; note = 2'-O-methyladenosine-3'-phosphate
  modified_base 16: mod_base = OTHER; note = 2'-O-methylcytidine-3'-phosphate
  modified_base 17: mod_base = OTHER; note = 2'-O-methyluridine-3'-phosphate
  modified_base 18: mod_base = OTHER; note = 2'-O-methylguanosine-3'-phosphate
  modified_base 19: mod_base = OTHER; note = 2'-O-methyluridine-3'-phosphate
  modified_base 20: mod_base = OTHER; note = 2'-O-methylcytidine-3'-phosphate
  modified_base 21: mod_base = OTHER; note = 2'-O-methyluridine-3'-phosphate ((2S,4R)-1-[29-[[2-(acetylamino)-2-deoxy-beta-D-galactopyra nosyl]oxy]-14,14-bis[[3-[[3-[[5-[[2-(acetylamino)-2-deoxy-b eta-D-galactopyranosyl]oxy]-1-oxopentyl]amino]propyl]amino] -3-oxopropoxy]methyl]-1,12,19,25-tetraoxo-16-oxa-13,20,24-t riazanonacos-1-yl]-4-hydroxy-2-pyrrolidinyl)methyl ester
ttcctctggatgggactgtct

SEQ ID NO: 400 - RNA, 21 nt, synthetic construct
  source 1..21: mol_type = other RNA
  modified_base 1: mod_base = OTHER; note = 2'-O-methylcytidine-3'-phosphorothioate
  modified_base 2: mod_base = OTHER; note = 2'-O-methyluridine-3'-phosphorothioate
  modified_base 3: mod_base = OTHER; note = 2'-O-methylguanosine-3'-phosphate
  modified_base 4: mod_base = OTHER; note = 2'-O-methylguanosine-3'-phosphate
  modified_base 5: mod_base = OTHER; note = 2'-O-methyladenosine-3'-phosphate
  modified_base 6: mod_base = OTHER; note = 2'-O-methyluridine-3'-phosphate
  modified_base 7: mod_base = OTHER; note = 2'-deoxy-2'-fluoroguanosine-3'-phosphate
  modified_base 8: mod_base = OTHER; note = 2'-O-methylguanosine-3'-phosphate
  modified_base 9: mod_base = OTHER; note = 2'-deoxy-2'-fluoroguanosine-3'-phosphate
  modified_base 10: mod_base = OTHER; note = 2'-deoxy-2'-fluoroadenosine-3'-phosphate
  modified_base 11: mod_base = OTHER; note = 2'-deoxy-2'-fluorocytidine-3'-phosphate
  modified_base 12: mod_base = OTHER; note = 2'-O-methyluridine-3'-phosphate
  modified_base 13: mod_base = OTHER; note = 2'-O-methylguanosine-3'-phosphate
  modified_base 14: mod_base = OTHER; note = 2'-O-methyluridine-3'-phosphate
  modified_base 15: mod_base = OTHER; note = 2'-O-methylcytidine-3'-phosphate
  modified_base 16: mod_base = OTHER; note = 2'-O-methyluridine-3'-phosphate
  modified_base 17: mod_base = OTHER; note = 2'-O-methylguanosine-3'-phosphate
  modified_base 18: mod_base = OTHER; note = 2'-O-methyluridine-3'-phosphate
  modified_base 19: mod_base = OTHER; note = 2'-O-methyluridine-3'-phosphate
  modified_base 20: mod_base = OTHER; note = 2'-O-methyluridine-3'-phosphate
  modified_base 21: mod_base = OTHER; note = 2'-O-methyluridine-3'-phosphate ((2S,4R)-1-[29-[[2-(acetylamino)-2-deoxy-beta-D-galactopyra nosyl]oxy]-14,14-bis[[3-[[3-[[5-[[2-(acetylamino)-2-deoxy-b eta-D-galactopyranosyl]oxy]-1-oxopentyl]amino]propyl]amino] -3-oxopropoxy]methyl]-1,12,19,25-tetraoxo-16-oxa-13,20,24-t riazanonacos-1-yl]-4-hydroxy-2-pyrrolidinyl)methyl ester
ctggatgggactgtctgtttt

SEQ ID NO: 401 - RNA, 21 nt, synthetic construct
  source 1..21: mol_type = other RNA
  modified_base 1: mod_base = OTHER; note = 2'-O-methyluridine-3'-phosphorothioate
  modified_base 2: mod_base = OTHER; note = 2'-O-methylguanosine-3'-phosphorothioate
  modified_base 3: mod_base = OTHER; note = 2'-O-methylguanosine-3'-phosphate
  modified_base 4: mod_base = OTHER; note = 2'-O-methylguanosine-3'-phosphate
  modified_base 5: mod_base = OTHER; note = 2'-O-methyladenosine-3'-phosphate
  modified_base 6: mod_base = OTHER; note = 2'-O-methylcytidine-3'-phosphate
  modified_base 7: mod_base = OTHER; note = 2'-deoxy-2'-fluorouridine-3'-phosphate
  modified_base 8: mod_base = OTHER; note = 2'-O-methylguanosine-3'-phosphate
  modified_base 9: mod_base = OTHER; note = 2'-deoxy-2'-fluorouridine-3'-phosphate
  modified_base 10: mod_base = OTHER; note = 2'-deoxy-2'-fluorocytidine-3'-phosphate
  modified_base 11: mod_base = OTHER; note = 2'-deoxy-2'-fluorouridine-3'-phosphate
  modified_base 12: mod_base = OTHER; note = 2'-O-methylguanosine-3'-phosphate
  modified_base 13: mod_base = OTHER; note = 2'-O-methyluridine-3'-phosphate
  modified_base 14: mod_base = OTHER; note = 2'-O-methyluridine-3'-phosphate
  modified_base 15: mod_base = OTHER; note = 2'-O-methyluridine-3'-phosphate
  modified_base 16: mod_base = OTHER; note = 2'-O-methylcytidine-3'-phosphate
  modified_base 17: mod_base = OTHER; note = 2'-O-methylguanosine-3'-phosphate
  modified_base 18: mod_base = OTHER; note = 2'-O-methylguanosine-3'-phosphate
  modified_base 19: mod_base = OTHER; note = 2'-O-methyladenosine-3'-phosphate
  modified_base 20: mod_base = OTHER; note = 2'-O-methylcytidine-3'-phosphate
  modified_base 21: mod_base = OTHER; note = 2'-O-methyluridine-3'-phosphate ((2S,4R)-1-[29-[[2-(acetylamino)-2-deoxy-beta-D-galactopyra nosyl]oxy]-14,14-bis[[3-[[3-[[5-[[2-(acetylamino)-2-deoxy-b eta-D-galactopyranosyl]oxy]-1-oxopentyl]amino]propyl]amino] -3-oxopropoxy]methyl]-1,12,19,25-tetraoxo-16-oxa-13,20,24-t riazanonacos-1-yl]-4-hydroxy-2-pyrrolidinyl)methyl ester
tgggactgtctgtttcggact

SEQ ID NO: 402 - RNA, 21 nt, synthetic construct
  source 1..21: mol_type = other RNA
  modified_base 1: mod_base = OTHER; note = 2'-O-methylcytidine-3'-phosphorothioate
  modified_base 2: mod_base = OTHER; note = 2'-O-methyluridine-3'-phosphorothioate
  modified_base 3: mod_base = OTHER; note = 2'-O-methylguanosine-3'-phosphate
  modified_base 4: mod_base = OTHER; note = 2'-O-methyluridine-3'-phosphate
  modified_base 5: mod_base = OTHER; note = 2'-O-methylcytidine-3'-phosphate
  modified_base 6: mod_base = OTHER; note = 2'-O-methyluridine-3'-phosphate
  modified_base 7: mod_base = OTHER; note = 2'-deoxy-2'-fluoroguanosine-3'-phosphate
  modified_base 8: mod_base = OTHER; note = 2'-O-methyluridine-3'-phosphate
  modified_base 9: mod_base = OTHER; note = 2'-deoxy-2'-fluorouridine-3'-phosphate
  modified_base 10: mod_base = OTHER; note = 2'-deoxy-2'-fluorouridine-3'-phosphate
  modified_base 11: mod_base = OTHER; note = 2'-deoxy-2'-fluorocytidine-3'-phosphate
  modified_base 12: mod_base = OTHER; note = 2'-O-methylguanosine-3'-phosphate
  modified_base 13: mod_base = OTHER; note = 2'-O-methylguanosine-3'-phosphate
  modified_base 14: mod_base = OTHER; note = 2'-O-methyladenosine-3'-phosphate
  modified_base 15: mod_base = OTHER; note = 2'-O-methylcytidine-3'-phosphate
  modified_base 16: mod_base = OTHER; note = 2'-O-methyladenosine-3'-phosphate
  modified_base 17: mod_base = OTHER; note = 2'-O-methyladenosine-3'-phosphate
  modified_base 18: mod_base = OTHER; note = 2'-O-methylcytidine-3'-phosphate
  modified_base 19: mod_base = OTHER; note = 2'-O-methyluridine-3'-phosphate
  modified_base 20: mod_base = OTHER; note = 2'-O-methyluridine-3'-phosphate
  modified_base 21: mod_base = OTHER; note = 2'-O-methyluridine-3'-phosphate ((2S,4R)-1-[29-[[2-(acetylamino)-2-deoxy-beta-D-galactopyra nosyl]oxy]-14,14-bis[[3-[[3-[[5-[[2-(acetylamino)-2-deoxy-b eta-D-galactopyranosyl]oxy]-1-oxopentyl]amino]propyl]amino] -3-oxopropoxy]methyl]-1,12,19,25-tetraoxo-16-oxa-13,20,24-t riazanonacos-1-yl]-4-hydroxy-2-pyrrolidinyl)methyl ester
ctgtctgtttcggacaacttt

SEQ ID NO: 403 - RNA, 21 nt, synthetic construct
  source 1..21: mol_type = other RNA
  modified_base 1: mod_base = OTHER; note = 2'-O-methyluridine-3'-phosphorothioate
  modified_base 2: mod_base = OTHER; note = 2'-O-methyluridine-3'-phosphorothioate
  modified_base 3: mod_base = OTHER; note = 2'-O-methylcytidine-3'-phosphate
  modified_base 4: mod_base = OTHER; note = 2'-O-methylguanosine-3'-phosphate
  modified_base 5: mod_base = OTHER; note = 2'-O-methylguanosine-3'-phosphate
  modified_base 6: mod_base = OTHER; note = 2'-O-methyladenosine-3'-phosphate
  modified_base 7: mod_base = OTHER; note = 2'-deoxy-2'-fluorocytidine-3'-phosphate
  modified_base 8: mod_base = OTHER; note = 2'-O-methyladenosine-3'-phosphate
  modified_base 9: mod_base = OTHER; note = 2'-deoxy-2'-fluoroadenosine-3'-phosphate
  modified_base 10: mod_base = OTHER; note = 2'-deoxy-2'-fluorocytidine-3'-phosphate
  modified_base 11: mod_base = OTHER; note = 2'-deoxy-2'-fluorouridine-3'-phosphate
  modified_base 12: mod_base = OTHER; note = 2'-O-methyluridine-3'-phosphate
  modified_base 13: mod_base = OTHER; note = 2'-O-methylcytidine-3'-phosphate
  modified_base 14: mod_base = OTHER; note = 2'-O-methyluridine-3'-phosphate
  modified_base 15: mod_base = OTHER; note = 2'-O-methylguanosine-3'-phosphate
  modified_base 16: mod_base = OTHER; note = 2'-O-methylguanosine-3'-phosphate
  modified_base 17: mod_base = OTHER; note = 2'-O-methylguanosine-3'-phosphate
  modified_base 18: mod_base = OTHER; note = 2'-O-methylcytidine-3'-phosphate
  modified_base 19: mod_base = OTHER; note = 2'-O-methyladenosine-3'-phosphate
  modified_base 20: mod_base = OTHER; note = 2'-O-methyluridine-3'-phosphate
  modified_base 21: mod_base = OTHER; note = 2'-O-methyluridine-3'-phosphate ((2S,4R)-1-[29-[[2-(acetylamino)-2-deoxy-beta-D-galactopyra nosyl]oxy]-14,14-bis[[3-[[3-[[5-[[2-(acetylamino)-2-deoxy-b eta-D-galactopyranosyl]oxy]-1-oxopentyl]amino]propyl]amino] -3-oxopropoxy]methyl]-1,12,19,25-tetraoxo-16-oxa-13,20,24-t riazanonacos-1-yl]-4-hydroxy-2-pyrrolidinyl)methyl ester
ttcggacaacttctgggcatt

SEQ ID NO: 404 - RNA, 21 nt, synthetic construct
  source 1..21: mol_type = other RNA
  modified_base 1: mod_base = OTHER; note = 2'-O-methylcytidine-3'-phosphorothioate
  modified_base 2: mod_base = OTHER; note = 2'-O-methyluridine-3'-phosphorothioate
  modified_base 3: mod_base = OTHER; note = 2'-O-methyluridine-3'-phosphate
  modified_base 4: mod_base = OTHER; note = 2'-O-methylcytidine-3'-phosphate
  modified_base 5: mod_base = OTHER; note = 2'-O-methyluridine-3'-phosphate
  modified_base 6: mod_base = OTHER; note = 2'-O-methylguanosine-3'-phosphate
  modified_base 7: mod_base = OTHER; note = 2'-deoxy-2'-fluoroguanosine-3'-phosphate
  modified_base 8: mod_base = OTHER; note = 2'-O-methylguanosine-3'-phosphate
  modified_base 9: mod_base = OTHER; note = 2'-deoxy-2'-fluorocytidine-3'-phosphate
  modified_base 10: mod_base = OTHER; note = 2'-deoxy-2'-fluoroadenosine-3'-phosphate
  modified_base 11: mod_base = OTHER; note = 2'-deoxy-2'-fluorouridine-3'-phosphate
  modified_base 12: mod_base = OTHER; note = 2'-O-methylguanosine-3'-phosphate
  modified_base 13: mod_base = OTHER; note = 2'-O-methyluridine-3'-phosphate
  modified_base 14: mod_base = OTHER; note = 2'-O-methylguanosine-3'-phosphate
  modified_base 15: mod_base = OTHER; note = 2'-O-methyluridine-3'-phosphate
  modified_base 16: mod_base = OTHER; note = 2'-O-methylguanosine-3'-phosphate
  modified_base 17: mod_base = OTHER; note = 2'-O-methyladenosine-3'-phosphate
  modified_base 18: mod_base = OTHER; note = 2'-O-methylcytidine-3'-phosphate
  modified_base 19: mod_base = OTHER; note = 2'-O-methylcytidine-3'-phosphate
  modified_base 20: mod_base = OTHER; note = 2'-O-methyladenosine-3'-phosphate
  modified_base 21: mod_base = OTHER; note = 2'-O-methyluridine-3'-phosphate ((2S,4R)-1-[29-[[2-(acetylamino)-2-deoxy-beta-D-galactopyra nosyl]oxy]-14,14-bis[[3-[[3-[[5-[[2-(acetylamino)-2-deoxy-b eta-D-galactopyranosyl]oxy]-1-oxopentyl]amino]propyl]amino] -3-oxopropoxy]methyl]-1,12,19,25-tetraoxo-16-oxa-13,20,24-t riazanonacos-1-yl]-4-hydroxy-2-pyrrolidinyl)methyl ester
cttctgggcatgtgtgaccat

SEQ ID NO: 405 - RNA, 21 nt, synthetic construct
  source 1..21: mol_type = other RNA
  modified_base 1: mod_base = OTHER; note = 2'-O-methyladenosine-3'-phosphorothioate
  modified_base 2: mod_base = OTHER; note = 2'-O-methyluridine-3'-phosphorothioate
  modified_base 3: mod_base = OTHER; note = 2'-O-methylguanosine-3'-phosphate
  modified_base 4: mod_base = OTHER; note = 2'-O-methyluridine-3'-phosphate
  modified_base 5: mod_base = OTHER; note = 2'-O-methylguanosine-3'-phosphate
  modified_base 6: mod_base = OTHER; note = 2'-O-methyluridine-3'-phosphate
  modified_base 7: mod_base = OTHER; note = 2'-deoxy-2'-fluoroguanosine-3'-phosphate
  modified_base 8: mod_base = OTHER; note = 2'-O-methyladenosine-3'-phosphate
  modified_base 9: mod_base = OTHER; note = 2'-deoxy-2'-fluorocytidine-3'-phosphate
  modified_base 10: mod_base = OTHER; note = 2'-deoxy-2'-fluorocytidine-3'-phosphate
  modified_base 11: mod_base = OTHER; note = 2'-deoxy-2'-fluoroadenosine-3'-phosphate
  modified_base 12: mod_base = OTHER; note = 2'-O-methylcytidine-3'-phosphate
  modified_base 13: mod_base = OTHER; note = 2'-O-methylguanosine-3'-phosphate
  modified_base 14: mod_base = OTHER; note = 2'-O-methyluridine-3'-phosphate
  modified_base 15: mod_base = OTHER; note = 2'-O-methylcytidine-3'-phosphate
  modified_base 16: mod_base = OTHER; note = 2'-O-methyluridine-3'-phosphate
  modified_base 17: mod_base = OTHER; note = 2'-O-methylcytidine-3'-phosphate
  modified_base 18: mod_base = OTHER; note = 2'-O-methyluridine-3'-phosphate
  modified_base 19: mod_base = OTHER; note = 2'-O-methylcytidine-3'-phosphate
  modified_base 20: mod_base = OTHER; note = 2'-O-methyluridine-3'-phosphate
  modified_base 21: mod_base = OTHER; note = 2'-O-methyluridine-3'-phosphate ((2S,4R)-1-[29-[[2-(acetylamino)-2-deoxy-beta-D-galactopyra nosyl]oxy]-14,14-bis[[3-[[3-[[5-[[2-(acetylamino)-2-deoxy-b eta-D-galactopyranosyl]oxy]-1-oxopentyl]amino]propyl]amino] -3-oxopropoxy]methyl]-1,12,19,25-tetraoxo-16-oxa-13,20,24-t riazanonacos-1-yl]-4-hydroxy-2-pyrrolidinyl)methyl ester
atgtgtgaccacgtctctctt

SEQ ID NO: 406 - RNA, 21 nt, synthetic construct
  source 1..21: mol_type = other RNA
  modified_base 1: mod_base = OTHER; note = 2'-O-methylguanosine-3'-phosphorothioate
  modified_base 2: mod_base = OTHER; note = 2'-O-methyladenosine-3'-phosphorothioate
  modified_base 3: mod_base = OTHER; note = 2'-O-methylcytidine-3'-phosphate
  modified_base 4: mod_base = OTHER; note = 2'-O-methylcytidine-3'-phosphate
  modified_base 5: mod_base = OTHER; note = 2'-O-methyladenosine-3'-phosphate
  modified_base 6: mod_base = OTHER; note = 2'-O-methylcytidine-3'-phosphate
  modified_base 7: mod_base = OTHER; note = 2'-deoxy-2'-fluoroguanosine-3'-phosphate
  modified_base 8: mod_base = OTHER; note = 2'-O-methyluridine-3'-phosphate
  modified_base 9: mod_base = OTHER; note = 2'-deoxy-2'-fluorocytidine-3'-phosphate
  modified_base 10: mod_base = OTHER; note = 2'-deoxy-2'-fluorouridine-3'-phosphate
  modified_base 11: mod_base = OTHER; note = 2'-deoxy-2'-fluorocytidine-3'-phosphate
  modified_base 12: mod_base = OTHER; note = 2'-O-methyluridine-3'-phosphate
  modified_base 13: mod_base = OTHER; note = 2'-O-methylcytidine-3'-phosphate
  modified_base 14: mod_base = OTHER; note = 2'-O-methyluridine-3'-phosphate
  modified_base 15: mod_base = OTHER; note = 2'-O-methyladenosine-3'-phosphate
  modified_base 16: mod_base = OTHER; note = 2'-O-methylguanosine-3'-phosphate
  modified_base 17: mod_base = OTHER; note = 2'-O-methylcytidine-3'-phosphate
  modified_base 18: mod_base = OTHER; note = 2'-O-methyladenosine-3'-phosphate
  modified_base 19: mod_base = OTHER; note = 2'-O-methylcytidine-3'-phosphate
  modified_base 20: mod_base = OTHER; note = 2'-O-methyluridine-3'-phosphate
  modified_base 21: mod_base = OTHER; note = 2'-O-methyluridine-3'-phosphate ((2S,4R)-1-[29-[[2-(acetylamino)-2-deoxy-beta-D-galactopyra nosyl]oxy]-14,14-bis[[3-[[3-[[5-[[2-(acetylamino)-2-deoxy-b eta-D-galactopyranosyl]oxy]-1-oxopentyl]amino]propyl]amino] -3-oxopropoxy]methyl]-1,12,19,25-tetraoxo-16-oxa-13,20,24-t riazanonacos-1-yl]-4-hydroxy-2-pyrrolidinyl)methyl ester
gaccacgtctctctagcactt

SEQ ID NO: 407 - RNA, 21 nt, synthetic construct
  source 1..21: mol_type = other RNA
  modified_base 1: mod_base = OTHER; note = 2'-O-methylguanosine-3'-phosphorothioate
  modified_base 2: mod_base = OTHER; note = 2'-O-methylcytidine-3'-phosphorothioate
  modified_base 3: mod_base = OTHER; note = 2'-O-methyladenosine-3'-phosphate
  modified_base 4: mod_base = OTHER; note = 2'-O-methylguanosine-3'-phosphate
  modified_base 5: mod_base = OTHER; note = 2'-O-methylguanosine-3'-phosphate
  modified_base 6: mod_base = OTHER; note = 2'-O-methylcytidine-3'-phosphate
  modified_base 7: mod_base = OTHER; note = 2'-deoxy-2'-fluorocytidine-3'-phosphate
  modified_base 8: mod_base = OTHER; note = 2'-O-methylguanosine-3'-phosphate
  modified_base 9: mod_base = OTHER; note = 2'-deoxy-2'-fluoroguanosine-3'-phosphate
  modified_base 10: mod_base = OTHER; note = 2'-deoxy-2'-fluorocytidine-3'-phosphate
  modified_base 11: mod_base = OTHER; note = 2'-deoxy-2'-fluorouridine-3'-phosphate
  modified_base 12: mod_base = OTHER; note = 2'-O-methyladenosine-3'-phosphate
  modified_base 13: mod_base = OTHER; note = 2'-O-methyluridine-3'-phosphate
  modified_base 14: mod_base = OTHER; note = 2'-O-methylguanosine-3'-phosphate
  modified_base 15: mod_base = OTHER; note = 2'-O-methyluridine-3'-phosphate
  modified_base 16: mod_base = OTHER; note = 2'-O-methyladenosine-3'-phosphate
  modified_base 17: mod_base = OTHER; note = 2'-O-methylguanosine-3'-phosphate
  modified_base 18: mod_base = OTHER; note = 2'-O-methyluridine-3'-phosphate
  modified_base 19: mod_base = OTHER; note = 2'-O-methylguanosine-3'-phosphate
  modified_base 20: mod_base = OTHER; note = 2'-O-methyluridine-3'-phosphate
  modified_base 21: mod_base = OTHER; note = 2'-O-methyluridine-3'-phosphate ((2S,4R)-1-[29-[[2-(acetylamino)-2-deoxy-beta-D-galactopyra nosyl]oxy]-14,14-bis[[3-[[3-[[5-[[2-(acetylamino)-2-deoxy-b eta-D-galactopyranosyl]oxy]-1-oxopentyl]amino]propyl]amino] -3-oxopropoxy]methyl]-1,12,19,25-tetraoxo-16-oxa-13,20,24-t riazanonacos-1-yl]-4-hydroxy-2-pyrrolidinyl)methyl ester
gcaggccggctatgtagtgtt

SEQ ID NO: 408 - RNA, 21 nt, synthetic construct
  source 1..21: mol_type = other RNA
  modified_base 1: mod_base = OTHER; note = 2'-O-methylcytidine-3'-phosphorothioate
  modified_base 2: mod_base = OTHER; note = 2'-O-methylcytidine-3'-phosphorothioate
  modified_base 3: mod_base = OTHER; note = 2'-O-methylguanosine-3'-phosphate
  modified_base 4: mod_base = OTHER; note = 2'-O-methylguanosine-3'-phosphate
  modified_base 5: mod_base = OTHER; note = 2'-O-methylcytidine-3'-phosphate
  modified_base 6: mod_base = OTHER; note = 2'-O-methyluridine-3'-phosphate
  modified_base 7: mod_base = OTHER; note = 2'-deoxy-2'-fluoroadenosine-3'-phosphate
  modified_base 8: mod_base = OTHER; note = 2'-O-methyluridine-3'-phosphate
  modified_base 9: mod_base = OTHER; note = 2'-deoxy-2'-fluoroguanosine-3'-phosphate
  modified_base 10: mod_base = OTHER; note = 2'-deoxy-2'-fluorouridine-3'-phosphate
  modified_base 11: mod_base = OTHER; note = 2'-deoxy-2'-fluoroadenosine-3'-phosphate
  modified_base 12: mod_base = OTHER; note = 2'-O-methylguanosine-3'-phosphate
  modified_base 13: mod_base = OTHER; note = 2'-O-methyluridine-3'-phosphate
  modified_base 14: mod_base = OTHER; note = 2'-O-methylguanosine-3'-phosphate
  modified_base 15: mod_base = OTHER; note = 2'-O-methyluridine-3'-phosphate
  modified_base 16: mod_base = OTHER; note = 2'-O-methyladenosine-3'-phosphate
  modified_base 17: mod_base = OTHER; note = 2'-O-methyluridine-3'-phosphate
  modified_base 18: mod_base = OTHER; note = 2'-O-methyladenosine-3'-phosphate
  modified_base 19: mod_base = OTHER; note = 2'-O-methyladenosine-3'-phosphate
  modified_base 20: mod_base = OTHER; note = 2'-O-methylguanosine-3'-phosphate
  modified_base 21: mod_base = OTHER; note = 2'-O-methyluridine-3'-phosphate ((2S,4R)-1-[29-[[2-(acetylamino)-2-deoxy-beta-D-galactopyra nosyl]oxy]-14,14-bis[[3-[[3-[[5-[[2-(acetylamino)-2-deoxy-b eta-D-galactopyranosyl]oxy]-1-oxopentyl]amino]propyl]amino] -3-oxopropoxy]methyl]-1,12,19,25-tetraoxo-16-oxa-13,20,24-t riazanonacos-1-yl]-4-hydroxy-2-pyrrolidinyl)methyl ester
ccggctatgtagtgtataagt

SEQ ID NO: 409 - RNA, 21 nt, synthetic construct
  source 1..21: mol_type = other RNA
  modified_base 1: mod_base = OTHER; note = 2'-O-methyladenosine-3'-phosphorothioate
  modified_base 2: mod_base = OTHER; note = 2'-O-methyluridine-3'-phosphorothioate
  modified_base 3: mod_base = OTHER; note = 2'-O-methylguanosine-3'-phosphate
  modified_base 4: mod_base = OTHER; note = 2'-O-methyluridine-3'-phosphate
  modified_base 5: mod_base = OTHER; note = 2'-O-methyladenosine-3'-phosphate
  modified_base 6: mod_base = OTHER; note = 2'-O-methylguanosine-3'-phosphate
  modified_base 7: mod_base = OTHER; note = 2'-deoxy-2'-fluorouridine-3'-phosphate
  modified_base 8: mod_base = OTHER; note = 2'-O-methylguanosine-3'-phosphate
  modified_base 9: mod_base = OTHER; note = 2'-deoxy-2'-fluorouridine-3'-phosphate
  modified_base 10: mod_base = OTHER; note = 2'-deoxy-2'-fluoroadenosine-3'-phosphate
  modified_base 11: mod_base = OTHER; note = 2'-deoxy-2'-fluorouridine-3'-phosphate
  modified_base 12: mod_base = OTHER; note = 2'-O-methyladenosine-3'-phosphate
  modified_base 13: mod_base = OTHER; note = 2'-O-methyladenosine-3'-phosphate
  modified_base 14: mod_base = OTHER; note = 2'-O-methylguanosine-3'-phosphate
  modified_base 15: mod_base = OTHER; note = 2'-O-methyluridine-3'-phosphate
  modified_base 16: mod_base = OTHER; note = 2'-O-methylcytidine-3'-phosphate
  modified_base 17: mod_base = OTHER; note = 2'-O-methylcytidine-3'-phosphate
  modified_base 18: mod_base = OTHER; note = 2'-O-methyladenosine-3'-phosphate
  modified_base 19: mod_base = OTHER; note = 2'-O-methyluridine-3'-phosphate
  modified_base 20: mod_base = OTHER; note = 2'-O-methyluridine-3'-phosphate
  modified_base 21: mod_base = OTHER; note = 2'-O-methyluridine-3'-phosphate ((2S,4R)-1-[29-[[2-(acetylamino)-2-deoxy-beta-D-galactopyra nosyl]oxy]-14,14-bis[[3-[[3-[[5-[[2-(acetylamino)-2-deoxy-b eta-D-galactopyranosyl]oxy]-1-oxopentyl]amino]propyl]amino] -3-oxopropoxy]methyl]-1,12,19,25-tetraoxo-16-oxa-13,20,24-t riazanonacos-1-yl]-4-hydroxy-2-pyrrolidinyl)methyl ester
atgtagtgtataagtccattt

SEQ ID NO: 410 - RNA, 21 nt, synthetic construct
  source 1..21: mol_type = other RNA
  modified_base 1: mod_base = OTHER; note = 2'-O-methylguanosine-3'-phosphorothioate
  modified_base 2: mod_base = OTHER; note = 2'-O-methyluridine-3'-phosphorothioate
  modified_base 3: mod_base = OTHER; note = 2'-O-methylguanosine-3'-phosphate
  modified_base 4: mod_base = OTHER; note = 2'-O-methyluridine-3'-phosphate
  modified_base 5: mod_base = OTHER; note = 2'-O-methyladenosine-3'-phosphate
  modified_base 6: mod_base = OTHER; note = 2'-O-methyluridine-3'-phosphate
  modified_base 7: mod_base = OTHER; note = 2'-deoxy-2'-fluoroadenosine-3'-phosphate
  modified_base 8: mod_base = OTHER; note = 2'-O-methyladenosine-3'-phosphate
  modified_base 9: mod_base = OTHER; note = 2'-deoxy-2'-fluoroguanosine-3'-phosphate
  modified_base 10: mod_base = OTHER; note = 2'-deoxy-2'-fluorouridine-3'-phosphate
  modified_base 11: mod_base = OTHER; note = 2'-deoxy-2'-fluorocytidine-3'-phosphate
  modified_base 12: mod_base = OTHER; note = 2'-O-methylcytidine-3'-phosphate
  modified_base 13: mod_base = OTHER; note = 2'-O-methyladenosine-3'-phosphate
  modified_base 14: mod_base = OTHER; note = 2'-O-methyluridine-3'-phosphate
  modified_base 15: mod_base = OTHER; note = 2'-O-methyluridine-3'-phosphate
  modified_base 16: mod_base = OTHER; note = 2'-O-methylcytidine-3'-phosphate
  modified_base 17: mod_base = OTHER; note = 2'-O-methylcytidine-3'-phosphate
  modified_base 18: mod_base = OTHER; note = 2'-O-methylcytidine-3'-phosphate
  modified_base 19: mod_base = OTHER; note = 2'-O-methyluridine-3'-phosphate
  modified_base 20: mod_base = OTHER; note = 2'-O-methyladenosine-3'-phosphate
  modified_base 21: mod_base = OTHER; note = 2'-O-methyluridine-3'-phosphate ((2S,4R)-1-[29-[[2-(acetylamino)-2-deoxy-beta-D-galactopyra nosyl]oxy]-14,14-bis[[3-[[3-[[5-[[2-(acetylamino)-2-deoxy-b eta-D-galactopyranosyl]oxy]-1-oxopentyl]amino]propyl]amino] -3-oxopropoxy]methyl]-1,12,19,25-tetraoxo-16-oxa-13,20,24-t riazanonacos-1-yl]-4-hydroxy-2-pyrrolidinyl)methyl ester
gtgtataagtccattccctat

SEQ ID NO: 411 - RNA, 21 nt, synthetic construct
  source 1..21: mol_type = other RNA
  modified_base 1: mod_base = OTHER; note = 2'-O-methyladenosine-3'-phosphorothioate
  modified_base 2: mod_base = OTHER; note = 2'-O-methyladenosine-3'-phosphorothioate
  modified_base 3: mod_base = OTHER; note = 2'-O-methylguanosine-3'-phosphate
  modified_base 4: mod_base = OTHER; note = 2'-O-methyluridine-3'-phosphate
  modified_base 5: mod_base = OTHER; note = 2'-O-methylcytidine-3'-phosphate
  modified_base 6: mod_base = OTHER; note = 2'-O-methylcytidine-3'-phosphate
  modified_base 7: mod_base = OTHER; note = 2'-deoxy-2'-fluoroadenosine-3'-phosphate
  modified_base 8: mod_base = OTHER; note = 2'-O-methyluridine-3'-phosphate
  modified_base 9: mod_base = OTHER; note = 2'-deoxy-2'-fluorouridine-3'-phosphate
  modified_base 10: mod_base = OTHER; note = 2'-deoxy-2'-fluorocytidine-3'-phosphate
  modified_base 11: mod_base = OTHER; note = 2'-deoxy-2'-fluorocytidine-3'-phosphate
  modified_base 12: mod_base = OTHER; note = 2'-O-methylcytidine-3'-phosphate
  modified_base 13: mod_base = OTHER; note = 2'-O-methyluridine-3'-phosphate
  modified_base 14: mod_base = OTHER; note = 2'-O-methyladenosine-3'-phosphate
  modified_base 15: mod_base = OTHER; note = 2'-O-methyluridine-3'-phosphate
  modified_base 16: mod_base = OTHER; note = 2'-O-methylguanosine-3'-phosphate
  modified_base 17: mod_base = OTHER; note = 2'-O-methylguanosine-3'-phosphate
  modified_base 18: mod_base = OTHER; note = 2'-O-methylcytidine-3'-phosphate
  modified_base 19: mod_base = OTHER; note = 2'-O-methyluridine-3'-phosphate
  modified_base 20: mod_base = OTHER; note = 2'-O-methylcytidine-3'-phosphate
  modified_base 21: mod_base = OTHER; note = 2'-O-methyluridine-3'-phosphate ((2S,4R)-1-[29-[[2-(acetylamino)-2-deoxy-beta-D-galactopyra nosyl]oxy]-14,14-bis[[3-[[3-[[5-[[2-(acetylamino)-2-deoxy-b eta-D-galactopyranosyl]oxy]-1-oxopentyl]amino]propyl]amino] -3-oxopropoxy]methyl]-1,12,19,25-tetraoxo-16-oxa-13,20,24-t riazanonacos-1-yl]-4-hydroxy-2-pyrrolidinyl)methyl ester
aagtccattccctatggctct

SEQ ID NO: 412 - RNA, 21 nt, synthetic construct
  source 1..21: mol_type = other RNA
  modified_base 1: mod_base = OTHER; note = 2'-O-methyluridine-3'-phosphorothioate
  modified_base 2: mod_base = OTHER; note = 2'-O-methyluridine-3'-phosphorothioate
  modified_base 3: mod_base = OTHER; note = 2'-O-methylcytidine-3'-phosphate
  modified_base 4: mod_base = OTHER; note = 2'-O-methylcytidine-3'-phosphate
  modified_base 5: mod_base = OTHER; note = 2'-O-methylcytidine-3'-phosphate
  modified_base 6: mod_base = OTHER; note = 2'-O-methyluridine-3'-phosphate
  modified_base 7: mod_base = OTHER; note = 2'-deoxy-2'-fluoroadenosine-3'-phosphate
  modified_base 8: mod_base = OTHER; note = 2'-O-methyluridine-3'-phosphate
  modified_base 9: mod_base = OTHER; note = 2'-deoxy-2'-fluoroguanosine-3'-phosphate
  modified_base 10: mod_base = OTHER; note = 2'-deoxy-2'-fluoroguanosine-3'-phosphate
  modified_base 11: mod_base = OTHER; note = 2'-deoxy-2'-fluorocytidine-3'-phosphate
  modified_base 12: mod_base = OTHER; note = 2'-O-methyluridine-3'-phosphate
  modified_base 13: mod_base = OTHER; note = 2'-O-methylcytidine-3'-phosphate
  modified_base 14: mod_base = OTHER; note = 2'-O-methylcytidine-3'-phosphate
  modified_base 15: mod_base = OTHER; note = 2'-O-methyluridine-3'-phosphate
  modified_base 16: mod_base = OTHER; note = 2'-O-methyluridine-3'-phosphate
  modified_base 17: mod_base = OTHER; note = 2'-O-methylguanosine-3'-phosphate
  modified_base 18: mod_base = OTHER; note = 2'-O-methylguanosine-3'-phosphate
  modified_base 19: mod_base = OTHER; note = 2'-O-methyladenosine-3'-phosphate
  modified_base 20: mod_base = OTHER; note = 2'-O-methylguanosine-3'-phosphate
  modified_base 21: mod_base = OTHER; note = 2'-O-methyluridine-3'-phosphate ((2S,4R)-1-[29-[[2-(acetylamino)-2-deoxy-beta-D-galactopyra nosyl]oxy]-14,14-bis[[3-[[3-[[5-[[2-(acetylamino)-2-deoxy-b eta-D-galactopyranosyl]oxy]-1-oxopentyl]amino]propyl]amino] -3-oxopropoxy]methyl]-1,12,19,25-tetraoxo-16-oxa-13,20,24-t riazanonacos-1-yl]-4-hydroxy-2-pyrrolidinyl)methyl ester
ttccctatggctccttggagt

SEQ ID NO: 413 - RNA, 21 nt, synthetic construct
  source 1..21: mol_type = other RNA
  modified_base 1: mod_base = OTHER; note = 2'-O-methylguanosine-3'-phosphorothioate
  modified_base 2: mod_base = OTHER; note = 2'-O-methylguanosine-3'-phosphorothioate
  modified_base 3: mod_base = OTHER; note = 2'-O-methylcytidine-3'-phosphate
  modified_base 4: mod_base = OTHER; note = 2'-O-methyluridine-3'-phosphate
  modified_base 5: mod_base = OTHER; note = 2'-O-methylcytidine-3'-phosphate
  modified_base 6: mod_base = OTHER; note = 2'-O-methylcytidine-3'-phosphate
  modified_base 7: mod_base = OTHER; note = 2'-deoxy-2'-fluorouridine-3'-phosphate
  modified_base 8: mod_base = OTHER; note = 2'-O-methyluridine-3'-phosphate
  modified_base 9: mod_base = OTHER; note = 2'-deoxy-2'-fluoroguanosine-3'-phosphate
  modified_base 10: mod_base = OTHER; note = 2'-deoxy-2'-fluoroguanosine-3'-phosphate
  modified_base 11: mod_base = OTHER; note = 2'-deoxy-2'-fluoroadenosine-3'-phosphate
  modified_base 12: mod_base = OTHER; note = 2'-O-methylguanosine-3'-phosphate
  modified_base 13: mod_base = OTHER; note = 2'-O-methylguanosine-3'-phosphate
  modified_base 14: mod_base = OTHER; note = 2'-O-methyladenosine-3'-phosphate
  modified_base 15: mod_base = OTHER; note = 2'-O-methylguanosine-3'-phosphate
  modified_base 16: mod_base = OTHER; note = 2'-O-methylguanosine-3'-phosphate
  modified_base 17: mod_base = OTHER; note = 2'-O-methyluridine-3'-phosphate
  modified_base 18: mod_base = OTHER; note = 2'-O-methyladenosine-3'-phosphate
  modified_base 19: mod_base = OTHER; note = 2'-O-methyladenosine-3'-phosphate
  modified_base 20: mod_base = OTHER; note = 2'-O-methyluridine-3'-phosphate
  modified_base 21: mod_base = OTHER; note = 2'-O-methyluridine-3'-phosphate ((2S,4R)-1-[29-[[2-(acetylamino)-2-deoxy-beta-D-galactopyra nosyl]oxy]-14,14-bis[[3-[[3-[[5-[[2-(acetylamino)-2-deoxy-b eta-D-galactopyranosyl]oxy]-1-oxopentyl]amino]propyl]amino] -3-oxopropoxy]methyl]-1,12,19,25-tetraoxo-16-oxa-13,20,24-t riazanonacos-1-yl]-4-hydroxy-2-pyrrolidinyl)methyl ester
ggctccttggaggaggtaatt

SEQ ID NO: 414 - RNA, 21 nt, synthetic construct
  source 1..21: mol_type = other RNA
  modified_base 1: mod_base = OTHER; note = 2'-O-methyladenosine-3'-phosphorothioate
  modified_base 2: mod_base = OTHER; note = 2'-O-methyluridine-3'-phosphorothioate
  modified_base 3: mod_base = OTHER; note = 2'-O-methylcytidine-3'-phosphate
  modified_base 4: mod_base = OTHER; note = 2'-O-methylcytidine-3'-phosphate
  modified_base 5: mod_base = OTHER; note = 2'-O-methylguanosine-3'-phosphate
  modified_base 6: mod_base = OTHER; note = 2'-O-methylguanosine-3'-phosphate
  modified_base 7: mod_base = OTHER; note = 2'-deoxy-2'-fluoroadenosine-3'-phosphate
  modified_base 8: mod_base = OTHER; note = 2'-O-methylguanosine-3'-phosphate
  modified_base 9: mod_base = OTHER; note = 2'-deoxy-2'-fluoroguanosine-3'-phosphate
  modified_base 10: mod_base = OTHER; note = 2'-deoxy-2'-fluoroguanosine-3'-phosphate
  modified_base 11: mod_base = OTHER; note = 2'-deoxy-2'-fluorocytidine-3'-phosphate
  modified_base 12: mod_base = OTHER; note = 2'-O-methylcytidine-3'-phosphate
  modified_base 13: mod_base = OTHER; note = 2'-O-methylcytidine-3'-phosphate
  modified_base 14: mod_base = OTHER; note = 2'-O-methyladenosine-3'-phosphate
  modified_base 15: mod_base = OTHER; note = 2'-O-methylguanosine-3'-phosphate
  modified_base 16: mod_base = OTHER; note = 2'-O-methylguanosine-3'-phosphate
  modified_base 17: mod_base = OTHER; note = 2'-O-methyladenosine-3'-phosphate
  modified_base 18: mod_base = OTHER; note = 2'-O-methylguanosine-3'-phosphate
  modified_base 19: mod_base = OTHER; note = 2'-O-methyladenosine-3'-phosphate
  modified_base 20: mod_base = OTHER; note = 2'-O-methyladenosine-3'-phosphate
  modified_base 21: mod_base = OTHER; note = 2'-O-methyluridine-3'-phosphate ((2S,4R)-1-[29-[[2-(acetylamino)-2-deoxy-beta-D-galactopyra nosyl]oxy]-14,14-bis[[3-[[3-[[5-[[2-(acetylamino)-2-deoxy-b eta-D-galactopyranosyl]oxy]-1-oxopentyl]amino]propyl]amino] -3-oxopropoxy]methyl]-1,12,19,25-tetraoxo-16-oxa-13,20,24-t riazanonacos-1-yl]-4-hydroxy-2-pyrrolidinyl)methyl ester
atccggagggcccaggagaat

SEQ ID NO: 415 - RNA, 21 nt, synthetic construct
  source 1..21: mol_type = other RNA
  modified_base 1: mod_base = OTHER; note = 2'-O-methylguanosine-3'-phosphorothioate
  modified_base 2: mod_base = OTHER; note = 2'-O-methyladenosine-3'-phosphorothioate
  modified_base 3: mod_base = OTHER; note = 2'-O-methyladenosine-3'-phosphate
  modified_base 4: mod_base = OTHER; note = 2'-O-methylcytidine-3'-phosphate
  modified_base 5: mod_base = OTHER; note = 2'-O-methylcytidine-3'-phosphate
  modified_base 6: mod_base = OTHER; note = 2'-O-methylguanosine-3'-phosphate
  modified_base 7: mod_base = OTHER; note = 2'-deoxy-2'-fluoroguanosine-3'-phosphate
  modified_base 8: mod_base = OTHER; note = 2'-O-methyladenosine-3'-phosphate
  modified_base 9: mod_base = OTHER; note = 2'-deoxy-2'-fluoroguanosine-3'-phosphate
  modified_base 10: mod_base = OTHER; note = 2'-deoxy-2'-fluorocytidine-3'-phosphate
  modified_base 11: mod_base = OTHER; note = 2'-deoxy-2'-fluoroguanosine-3'-phosphate
  modified_base 12: mod_base = OTHER; note = 2'-O-methyluridine-3'-phosphate
  modified_base 13: mod_base = OTHER; note = 2'-O-methylguanosine-3'-phosphate
  modified_base 14: mod_base = OTHER; note = 2'-O-methylcytidine-3'-phosphate
  modified_base 15: mod_base = OTHER; note = 2'-O-methyluridine-3'-phosphate
  modified_base 16: mod_base = OTHER; note = 2'-O-methyluridine-3'-phosphate
  modified_base 17: mod_base = OTHER; note = 2'-O-methylcytidine-3'-phosphate
  modified_base 18: mod_base = OTHER; note = 2'-O-methyladenosine-3'-phosphate
  modified_base 19: mod_base = OTHER; note = 2'-O-methylguanosine-3'-phosphate
  modified_base 20: mod_base = OTHER; note = 2'-O-methylguanosine-3'-phosphate
  modified_base 21: mod_base = OTHER; note = 2'-O-methyluridine-3'-phosphate ((2S,4R)-1-[29-[[2-(acetylamino)-2-deoxy-beta-D-galactopyra nosyl]oxy]-14,14-bis[[3-[[3-[[5-[[2-(acetylamino)-2-deoxy-b eta-D-galactopyranosyl]oxy]-1-oxopentyl]amino]propyl]amino] -3-oxopropoxy]methyl]-1,12,19,25-tetraoxo-16-oxa-13,20,24-t riazanonacos-1-yl]-4-hydroxy-2-pyrrolidinyl)methyl ester
gaaccggagcgtgcttcaggt

SEQ ID NO: 416 - RNA, 21 nt, synthetic construct
  source 1..21: mol_type = other RNA
  modified_base 1: mod_base = OTHER; note = 2'-O-methylcytidine-3'-phosphorothioate
  modified_base 2: mod_base = OTHER; note = 2'-O-methyladenosine-3'-phosphorothioate
  modified_base 3: mod_base = OTHER; note = 2'-O-methylguanosine-3'-phosphate
  modified_base 4: mod_base = OTHER; note = 2'-O-methylguanosine-3'-phosphate
  modified_base 5: mod_base = OTHER; note = 2'-O-methylguanosine-3'-phosphate
  modified_base 6: mod_base = OTHER; note = 2'-O-methyluridine-3'-phosphate
  modified_base 7: mod_base = OTHER; note = 2'-deoxy-2'-fluoroguanosine-3'-phosphate
  modified_base 8: mod_base = OTHER; note = 2'-O-methylcytidine-3'-phosphate
  modified_base 9: mod_base = OTHER; note = 2'-deoxy-2'-fluorocytidine-3'-phosphate
  modified_base 10: mod_base = OTHER; note = 2'-deoxy-2'-fluorocytidine-3'-phosphate
  modified_base 11: mod_base = OTHER; note = 2'-deoxy-2'-fluoroguanosine-3'-phosphate
  modified_base 12: mod_base = OTHER; note = 2'-O-methylcytidine-3'-phosphate
  modified_base 13: mod_base = OTHER; note = 2'-O-methyladenosine-3'-phosphate
  modified_base 14: mod_base = OTHER; note = 2'-O-methylguanosine-3'-phosphate
  modified_base 15: mod_base = OTHER; note = 2'-O-methylguanosine-3'-phosphate
  modified_base 16: mod_base = OTHER; note = 2'-O-methylguanosine-3'-phosphate
  modified_base 17: mod_base = OTHER; note = 2'-O-methyladenosine-3'-phosphate
  modified_base 18: mod_base = OTHER; note = 2'-O-methyladenosine-3'-phosphate
  modified_base 19: mod_base = OTHER; note = 2'-O-methylcytidine-3'-phosphate
  modified_base 20: mod_base = OTHER; note = 2'-O-methyladenosine-3'-phosphate
  modified_base 21: mod_base = OTHER; note = 2'-O-methyluridine-3'-phosphate ((2S,4R)-1-[29-[[2-(acetylamino)-2-deoxy-beta-D-galactopyra nosyl]oxy]-14,14-bis[[3-[[3-[[5-[[2-(acetylamino)-2-deoxy-b eta-D-galactopyranosyl]oxy]-1-oxopentyl]amino]propyl]amino] -3-oxopropoxy]methyl]-1,12,19,25-tetraoxo-16-oxa-13,20,24-t riazanonacos-1-yl]-4-hydroxy-2-pyrrolidinyl)methyl ester
cagggtgcccgcagggaacat

SEQ ID NO: 417 - RNA, 21 nt, synthetic construct
  source 1..21: mol_type = other RNA
  modified_base 1: mod_base = OTHER; note = 2'-O-methylcytidine-3'-phosphorothioate
  modified_base 2: mod_base = OTHER; note = 2'-O-methyladenosine-3'-phosphorothioate
  modified_base 3: mod_base = OTHER; note = 2'-O-methylguanosine-3'-phosphate
  modified_base 4: mod_base = OTHER; note = 2'-O-methylguanosine-3'-phosphate
  modified_base 5: mod_base = OTHER; note = 2'-O-methylguanosine-3'-phosphate
  modified_base 6: mod_base = OTHER; note = 2'-O-methyladenosine-3'-phosphate
  modified_base 7: mod_base = OTHER; note = 2'-deoxy-2'-fluoroadenosine-3'-phosphate
  modified_base 8: mod_base = OTHER; note = 2'-O-methylcytidine-3'-phosphate
  modified_base 9: mod_base = OTHER; note = 2'-deoxy-2'-fluoroadenosine-3'-phosphate
  modified_base 10: mod_base = OTHER; note = 2'-deoxy-2'-fluoroguanosine-3'-phosphate
  modified_base 11: mod_base = OTHER; note = 2'-deoxy-2'-fluoroguanosine-3'-phosphate
  modified_base 12: mod_base = OTHER; note = 2'-O-methyladenosine-3'-phosphate
  modified_base 13: mod_base = OTHER; note = 2'-O-methylguanosine-3'-phosphate
  modified_base 14: mod_base = OTHER; note = 2'-O-methylcytidine-3'-phosphate
  modified_base 15: mod_base = OTHER; note = 2'-O-methyluridine-3'-phosphate
  modified_base 16: mod_base = OTHER; note = 2'-O-methylguanosine-3'-phosphate
  modified_base 17: mod_base = OTHER; note = 2'-O-methylcytidine-3'-phosphate
  modified_base 18: mod_base = OTHER; note = 2'-O-methyluridine-3'-phosphate
  modified_base 19: mod_base = OTHER; note = 2'-O-methylcytidine-3'-phosphate
  modified_base 20: mod_base = OTHER; note = 2'-O-methyladenosine-3'-phosphate
  modified_base 21: mod_base = OTHER; note = 2'-O-methyluridine-3'-phosphate ((2S,4R)-1-[29-[[2-(acetylamino)-2-deoxy-beta-D-galactopyra nosyl]oxy]-14,14-bis[[3-[[3-[[5-[[2-(acetylamino)-2-deoxy-b eta-D-galactopyranosyl]oxy]-1-oxopentyl]amino]propyl]amino] -3-oxopropoxy]methyl]-1,12,19,25-tetraoxo-16-oxa-13,20,24-t riazanonacos-1-yl]-4-hydroxy-2-pyrrolidinyl)methyl ester
cagggaacaggagctgctcat

SEQ ID NO: 418 - RNA, 21 nt, synthetic construct
  source 1..21: mol_type = other RNA
  modified_base 1: mod_base = OTHER; note = 2'-O-methyladenosine-3'-phosphorothioate
  modified_base 2: mod_base = OTHER; note = 2'-O-methyladenosine-3'-phosphorothioate
  modified_base 3: mod_base = OTHER; note = 2'-O-methylcytidine-3'-phosphate
  modified_base 4: mod_base = OTHER; note = 2'-O-methyladenosine-3'-phosphate
  modified_base 5: mod_base = OTHER; note = 2'-O-methylguanosine-3'-phosphate
  modified_base 6: mod_base = OTHER; note = 2'-O-methylguanosine-3'-phosphate
  modified_base 7: mod_base = OTHER; note = 2'-deoxy-2'-fluoroadenosine-3'-phosphate
  modified_base 8: mod_base = OTHER; note = 2'-O-methylguanosine-3'-phosphate
  modified_base 9: mod_base = OTHER; note = 2'-deoxy-2'-fluorocytidine-3'-phosphate
  modified_base 10: mod_base = OTHER; note = 2'-deoxy-2'-fluorouridine-3'-phosphate
  modified_base 11: mod_base = OTHER; note = 2'-deoxy-2'-fluoroguanosine-3'-phosphate
  modified_base 12: mod_base = OTHER; note = 2'-O-methylcytidine-3'-phosphate
  modified_base 13: mod_base = OTHER; note = 2'-O-methyluridine-3'-phosphate
  modified_base 14: mod_base = OTHER; note = 2'-O-methylcytidine-3'-phosphate
  modified_base 15: mod_base = OTHER; note = 2'-O-methyladenosine-3'-phosphate
  modified_base 16: mod_base = OTHER; note = 2'-O-methylguanosine-3'-phosphate
  modified_base 17: mod_base = OTHER; note = 2'-O-methylcytidine-3'-phosphate
  modified_base 18: mod_base = OTHER; note = 2'-O-methylcytidine-3'-phosphate
  modified_base 19: mod_base = OTHER; note = 2'-O-methyladenosine-3'-phosphate
  modified_base 20: mod_base = OTHER; note = 2'-O-methyladenosine-3'-phosphate
  modified_base 21: mod_base = OTHER; note = 2'-O-methyluridine-3'-phosphate ((2S,4R)-1-[29-[[2-(acetylamino)-2-deoxy-beta-D-galactopyra nosyl]oxy]-14,14-bis[[3-[[3-[[5-[[2-(acetylamino)-2-deoxy-b eta-D-galactopyranosyl]oxy]-1-oxopentyl]amino]propyl]amino] -3-oxopropoxy]methyl]-1,12,19,25-tetraoxo-16-oxa-13,20,24-t riazanonacos-1-yl]-4-hydroxy-2-pyrrolidinyl)methyl ester
aacaggagctgctcagccaat

SEQ ID NO: 419 - RNA, 21 nt, synthetic construct
  source 1..21: mol_type = other RNA
  modified_base 1: mod_base = OTHER; note = 2'-O-methylguanosine-3'-phosphorothioate
  modified_base 2: mod_base = OTHER; note = 2'-O-methyladenosine-3'-phosphorothioate
  modified_base 3: mod_base = OTHER; note = 2'-O-methylguanosine-3'-phosphate
  modified_base 4: mod_base = OTHER; note = 2'-O-methylcytidine-3'-phosphate
  modified_base 5: mod_base = OTHER; note = 2'-O-methyluridine-3'-phosphate
  modified_base 6: mod_base = OTHER; note = 2'-O-methylguanosine-3'-phosphate
  modified_base 7: mod_base = OTHER; note = 2'-deoxy-2'-fluorocytidine-3'-phosphate
  modified_base 8: mod_base = OTHER; note = 2'-O-methyluridine-3'-phosphate
  modified_base 9: mod_base = OTHER; note = 2'-deoxy-2'-fluorocytidine-3'-phosphate
  modified_base 10: mod_base = OTHER; note = 2'-deoxy-2'-fluoroadenosine-3'-phosphate
  modified_base 11: mod_base = OTHER; note = 2'-deoxy-2'-fluoroguanosine-3'-phosphate
  modified_base 12: mod_base = OTHER; note = 2'-O-methylcytidine-3'-phosphate
  modified_base 13: mod_base = OTHER; note = 2'-O-methylcytidine-3'-phosphate
  modified_base 14: mod_base = OTHER; note = 2'-O-methyladenosine-3'-phosphate
  modified_base 15: mod_base = OTHER; note = 2'-O-methyladenosine-3'-phosphate
  modified_base 16: mod_base = OTHER; note = 2'-O-methylguanosine-3'-phosphate
  modified_base 17: mod_base = OTHER; note = 2'-O-methyladenosine-3'-phosphate
  modified_base 18: mod_base = OTHER; note = 2'-O-methyladenosine-3'-phosphate
  modified_base 19: mod_base = OTHER; note = 2'-O-methylcytidine-3'-phosphate
  modified_base 20: mod_base = OTHER; note = 2'-O-methyluridine-3'-phosphate
  modified_base 21: mod_base = OTHER; note = 2'-O-methyluridine-3'-phosphate ((2S,4R)-1-[29-[[2-(acetylamino)-2-deoxy-beta-D-galactopyra nosyl]oxy]-14,14-bis[[3-[[3-[[5-[[2-(acetylamino)-2-deoxy-b eta-D-galactopyranosyl]oxy]-1-oxopentyl]amino]propyl]amino] -3-oxopropoxy]methyl]-1,12,19,25-tetraoxo-16-oxa-13,20,24-t riazanonacos-1-yl]-4-hydroxy-2-pyrrolidinyl)methyl ester
gagctgctcagccaagaactt

SEQ ID NO: 420 - RNA, 21 nt, synthetic construct
  source 1..21: mol_type = other RNA
  modified_base 1: mod_base = OTHER; note = 2'-O-methylguanosine-3'-phosphorothioate
  modified_base 2: mod_base = OTHER; note = 2'-O-methylcytidine-3'-phosphorothioate
  modified_base 3: mod_base = OTHER; note = 2'-O-methyluridine-3'-phosphate
  modified_base 4: mod_base = OTHER; note = 2'-O-methylcytidine-3'-phosphate
  modified_base 5: mod_base = OTHER; note = 2'-O-methyladenosine-3'-phosphate
  modified_base 6: mod_base = OTHER; note = 2'-O-methylguanosine-3'-phosphate
  modified_base 7: mod_base = OTHER; note = 2'-deoxy-2'-fluorocytidine-3'-phosphate
  modified_base 8: mod_base = OTHER; note = 2'-O-methylcytidine-3'-phosphate
  modified_base 9: mod_base = OTHER; note = 2'-deoxy-2'-fluoroadenosine-3'-phosphate
  modified_base 10: mod_base = OTHER; note = 2'-deoxy-2'-fluoroadenosine-3'-phosphate
  modified_base 11: mod_base = OTHER; note = 2'-deoxy-2'-fluoroguanosine-3'-phosphate
  modified_base 12: mod_base = OTHER; note = 2'-O-methyladenosine-3'-phosphate
  modified_base 13: mod_base = OTHER; note = 2'-O-methyladenosine-3'-phosphate
  modified_base 14: mod_base = OTHER; note = 2'-O-methylcytidine-3'-phosphate
  modified_base 15: mod_base = OTHER; note = 2'-O-methyluridine-3'-phosphate
  modified_base 16: mod_base = OTHER; note = 2'-O-methylguanosine-3'-phosphate
  modified_base 17: mod_base = OTHER; note = 2'-O-methyluridine-3'-phosphate
  modified_base 18: mod_base = OTHER; note = 2'-O-methylguanosine-3'-phosphate
  modified_base 19: mod_base = OTHER; note = 2'-O-methylguanosine-3'-phosphate
  modified_base 20: mod_base = OTHER; note = 2'-O-methylcytidine-3'-phosphate
  modified_base 21: mod_base = OTHER; note = 2'-O-methyluridine-3'-phosphate ((2S,4R)-1-[29-[[2-(acetylamino)-2-deoxy-beta-D-galactopyra nosyl]oxy]-14,14-bis[[3-[[3-[[5-[[2-(acetylamino)-2-deoxy-b eta-D-galactopyranosyl]oxy]-1-oxopentyl]amino]propyl]amino] -3-oxopropoxy]methyl]-1,12,19,25-tetraoxo-16-oxa-13,20,24-t riazanonacos-1-yl]-4-hydroxy-2-pyrrolidinyl)methyl ester
gctcagccaagaactgtggct

SEQ ID NO: 421 - RNA, 21 nt, synthetic construct
  source 1..21: mol_type = other RNA
  modified_base 1: mod_base = OTHER; note = 2'-O-methyluridine-3'-phosphorothioate
  modified_base 2: mod_base = OTHER; note = 2'-O-methylguanosine-3'-phosphorothioate
  modified_base 3: mod_base = OTHER; note = 2'-O-methylcytidine-3'-phosphate
  modified_base 4: mod_base = OTHER; note = 2'-O-methylcytidine-3'-phosphate
  modified_base 5: mod_base = OTHER; note = 2'-O-methyladenosine-3'-phosphate
  modified_base 6: mod_base = OTHER; note = 2'-O-methylguanosine-3'-phosphate
  modified_base 7: mod_base = OTHER; note = 2'-deoxy-2'-fluoroguanosine-3'-phosphate
  modified_base 8: mod_base = OTHER; note = 2'-O-methyladenosine-3'-phosphate
  modified_base 9: mod_base = OTHER; note = 2'-deoxy-2'-fluorouridine-3'-phosphate
  modified_base 10: mod_base = OTHER; note = 2'-deoxy-2'-fluoroguanosine-3'-phosphate
  modified_base 11: mod_base = OTHER; note = 2'-deoxy-2'-fluorocytidine-3'-phosphate
  modified_base 12: mod_base = OTHER; note = 2'-O-methylcytidine-3'-phosphate
  modified_base 13: mod_base = OTHER; note = 2'-O-methylguanosine-3'-phosphate
  modified_base 14: mod_base = OTHER; note = 2'-O-methyladenosine-3'-phosphate
  modified_base 15: mod_base = OTHER; note = 2'-O-methyladenosine-3'-phosphate
  modified_base 16: mod_base = OTHER; note = 2'-O-methylguanosine-3'-phosphate
  modified_base 17: mod_base = OTHER; note = 2'-O-methylguanosine-3'-phosphate
  modified_base 18: mod_base = OTHER; note = 2'-O-methyladenosine-3'-phosphate
  modified_base 19: mod_base = OTHER; note = 2'-O-methyluridine-3'-phosphate
  modified_base 20: mod_base = OTHER; note = 2'-O-methyladenosine-3'-phosphate
  modified_base 21: mod_base = OTHER; note = 2'-O-methyluridine-3'-phosphate ((2S,4R)-1-[29-[[2-(acetylamino)-2-deoxy-beta-D-galactopyra nosyl]oxy]-14,14-bis[[3-[[3-[[5-[[2-(acetylamino)-2-deoxy-b eta-D-galactopyranosyl]oxy]-1-oxopentyl]amino]propyl]amino] -3-oxopropoxy]methyl]-1,12,19,25-tetraoxo-16-oxa-13,20,24-t riazanonacos-1-yl]-4-hydroxy-2-pyrrolidinyl)methyl ester
tgccaggatgccgaaggatat

SEQ ID NO: 422 - RNA, 21 nt, synthetic construct
  source 1..21: mol_type = other RNA
  modified_base 1: mod_base = OTHER; note = 2'-O-methyluridine-3'-phosphorothioate
  modified_base 2: mod_base = OTHER; note = 2'-O-methylcytidine-3'-phosphorothioate
  modified_base 3: mod_base = OTHER; note = 2'-O-methyladenosine-3'-phosphate
  modified_base 4: mod_base = OTHER; note = 2'-O-methyluridine-3'-phosphate
  modified_base 5: mod_base = OTHER; note = 2'-O-methylguanosine-3'-phosphate
  modified_base 6: mod_base = OTHER; note = 2'-O-methyluridine-3'-phosphate
  modified_base 7: mod_base = OTHER; note = 2'-deoxy-2'-fluoroguanosine-3'-phosphate
  modified_base 8: mod_base = OTHER; note = 2'-O-methylguanosine-3'-phosphate
  modified_base 9: mod_base = OTHER; note = 2'-deoxy-2'-fluorouridine-3'-phosphate
  modified_base 10: mod_base = OTHER; note = 2'-deoxy-2'-fluorocytidine-3'-phosphate
  modified_base 11: mod_base = OTHER; note = 2'-deoxy-2'-fluoroadenosine-3'-phosphate
  modified_base 12: mod_base = OTHER; note = 2'-O-methyladenosine-3'-phosphate
  modified_base 13: mod_base = OTHER; note = 2'-O-methyluridine-3'-phosphate
  modified_base 14: mod_base = OTHER; note = 2'-O-methyladenosine-3'-phosphate
  modified_base 15: mod_base = OTHER; note = 2'-O-methyladenosine-3'-phosphate
  modified_base 16: mod_base = OTHER; note = 2'-O-methyladenosine-3'-phosphate
  modified_base 17: mod_base = OTHER; note = 2'-O-methyladenosine-3'-phosphate
  modified_base 18: mod_base = OTHER; note = 2'-O-methylguanosine-3'-phosphate
  modified_base 19: mod_base = OTHER; note = 2'-O-methyluridine-3'-phosphate
  modified_base 20: mod_base = OTHER; note = 2'-O-methylcytidine-3'-phosphate
  modified_base 21: mod_base = OTHER; note = 2'-O-methyluridine-3'-phosphate ((2S,4R)-1-[29-[[2-(acetylamino)-2-deoxy-beta-D-galactopyra nosyl]oxy]-14,14-bis[[3-[[3-[[5-[[2-(acetylamino)-2-deoxy-b eta-D-galactopyranosyl]oxy]-1-oxopentyl]amino]propyl]amino] -3-oxopropoxy]methyl]-1,12,19,25-tetraoxo-16-oxa-13,20,24-t riazanonacos-1-yl]-4-hydroxy-2-pyrrolidinyl)methyl ester
tcatgtggtcaataaaagtct

SEQ ID NO: 423 - RNA, 21 nt, synthetic construct
  source 1..21: mol_type = other RNA
  modified_base 1: mod_base = OTHER; note = 2'-O-methyluridine-3'-phosphorothioate
  modified_base 2: mod_base = OTHER; note = 2'-O-methylcytidine-3'-phosphorothioate
  modified_base 3: mod_base = OTHER; note = 2'-O-methyladenosine-3'-phosphate
  modified_base 4: mod_base = OTHER; note = 2'-O-methyladenosine-3'-phosphate
  modified_base 5: mod_base = OTHER; note = 2'-O-methyluridine-3'-phosphate
  modified_base 6: mod_base = OTHER; note = 2'-O-methyladenosine-3'-phosphate
  modified_base 7: mod_base = OTHER; note = 2'-deoxy-2'-fluoroadenosine-3'-phosphate
  modified_base 8: mod_base = OTHER; note = 2'-O-methyladenosine-3'-phosphate
  modified_base 9: mod_base = OTHER; note = 2'-deoxy-2'-fluoroadenosine-3'-phosphate
  modified_base 10: mod_base = OTHER; note = 2'-deoxy-2'-fluoroguanosine-3'-phosphate
  modified_base 11: mod_base = OTHER; note = 2'-deoxy-2'-fluorouridine-3'-phosphate
  modified_base 12: mod_base = OTHER; note = 2'-O-methylcytidine-3'-phosphate
  modified_base 13: mod_base = OTHER; note = 2'-O-methylcytidine-3'-phosphate
  modified_base 14: mod_base = OTHER; note = 2'-O-methyluridine-3'-phosphate
  modified_base 15: mod_base = OTHER; note = 2'-O-methyluridine-3'-phosphate
  modified_base 16: mod_base = OTHER; note = 2'-O-methyladenosine-3'-phosphate
  modified_base 17: mod_base = OTHER; note = 2'-O-methylguanosine-3'-phosphate
  modified_base 18: mod_base = OTHER; note = 2'-O-methylguanosine-3'-phosphate
  modified_base 19: mod_base = OTHER; note = 2'-O-methyluridine-3'-phosphate
  modified_base 20: mod_base = OTHER; note = 2'-O-methylguanosine-3'-phosphate
  modified_base 21: mod_base = OTHER; note = 2'-O-methyluridine-3'-phosphate ((2S,4R)-1-[29-[[2-(acetylamino)-2-deoxy-beta-D-galactopyra nosyl]oxy]-14,14-bis[[3-[[3-[[5-[[2-(acetylamino)-2-deoxy-b eta-D-galactopyranosyl]oxy]-1-oxopentyl]amino]propyl]amino] -3-oxopropoxy]methyl]-1,12,19,25-tetraoxo-16-oxa-13,20,24-t riazanonacos-1-yl]-4-hydroxy-2-pyrrolidinyl)methyl ester
tcaataaaagtccttaggtgt

SEQ ID NO: 424 - RNA, 21 nt, synthetic construct
  source 1..21: mol_type = other RNA
  modified_base 1: mod_base = OTHER; note = 2'-O-methyladenosine-3'-phosphorothioate
  modified_base 2: mod_base = OTHER; note = 2'-O-methyladenosine-3'-phosphorothioate
  modified_base 3: mod_base = OTHER; note = 2'-O-methyladenosine-3'-phosphate
  modified_base 4: mod_base = OTHER; note = 2'-O-methyladenosine-3'-phosphate
  modified_base 5: mod_base = OTHER; note = 2'-O-methylguanosine-3'-phosphate
  modified_base 6: mod_base = OTHER; note = 2'-O-methyluridine-3'-phosphate
  modified_base 7: mod_base = OTHER; note = 2'-deoxy-2'-fluorocytidine-3'-phosphate
  modified_base 8: mod_base = OTHER; note = 2'-O-methylcytidine-3'-phosphate
  modified_base 9: mod_base = OTHER; note = 2'-deoxy-2'-fluorouridine-3'-phosphate
  modified_base 10: mod_base = OTHER; note = 2'-deoxy-2'-fluorouridine-3'-phosphate
  modified_base 11: mod_base = OTHER; note = 2'-deoxy-2'-fluoroadenosine-3'-phosphate
  modified_base 12: mod_base = OTHER; note = 2'-O-methylguanosine-3'-phosphate
  modified_base 13: mod_base = OTHER; note = 2'-O-methylguanosine-3'-phosphate
  modified_base 14: mod_base = OTHER; note = 2'-O-methyluridine-3'-phosphate
  modified_base 15: mod_base = OTHER; note = 2'-O-methylguanosine-3'-phosphate
  modified_base 16: mod_base = OTHER; note = 2'-O-methylcytidine-3'-phosphate
  modified_base 17: mod_base = OTHER; note = 2'-O-methyluridine-3'-phosphate
  modified_base 18: mod_base = OTHER; note = 2'-O-methylguanosine-3'-phosphate
  modified_base 19: mod_base = OTHER; note = 2'-O-methylcytidine-3'-phosphate
  modified_base 20: mod_base = OTHER; note = 2'-O-methylcytidine-3'-phosphate
  modified_base 21: mod_base = OTHER; note = 2'-O-methyluridine-3'-phosphate ((2S,4R)-1-[29-[[2-(acetylamino)-2-deoxy-beta-D-galactopyra nosyl]oxy]-14,14-bis[[3-[[3-[[5-[[2-(acetylamino)-2-deoxy-b eta-D-galactopyranosyl]oxy]-1-oxopentyl]amino]propyl]amino] -3-oxopropoxy]methyl]-1,12,19,25-tetraoxo-16-oxa-13,20,24-t riazanonacos-1-yl]-4-hydroxy-2-pyrrolidinyl)methyl ester
aaaagtccttaggtgctgcct

SEQ ID NO: 425 - RNA, 23 nt, synthetic construct
  source 1..23: mol_type = other RNA
  modified_base 1: mod_base = OTHER; note = 2'-O-methyladenosine-3'-phosphorothioate
  modified_base 2: mod_base = OTHER; note = 2'-deoxy-2'-fluorouridine-3'-phosphorothioate
  modified_base 3: mod_base = OTHER; note = 2'-O-methylcytidine-3'-phosphate
  modified_base 4: mod_base = OTHER; note = 2'-O-methylcytidine-3'-phosphate
  modified_base 5: mod_base = OTHER; note = 2'-O-methyladenosine-3'-phosphate
  modified_base 6: mod_base = OTHER; note = 2'-deoxy-2'-fluorocytidine-3'-phosphate
  modified_base 7: mod_base = OTHER; note = 2'-O-methyladenosine-3'-phosphate
  modified_base 8: mod_base = OTHER; note = 2'-deoxy-2'-fluorocytidine-3'-phosphate
  modified_base 9: mod_base = OTHER; note = 2'-deoxy-2'-fluorocytidine-3'-phosphate
  modified_base 10: mod_base = OTHER; note = 2'-O-methyladenosine-3'-phosphate
  modified_base 11: mod_base = OTHER; note = 2'-O-methylguanosine-3'-phosphate
  modified_base 12: mod_base = OTHER; note = 2'-O-methylguanosine-3'-phosphate
  modified_base 13: mod_base = OTHER; note = 2'-O-methylguanosine-3'-phosphate
  modified_base 14: mod_base = OTHER; note = 2'-deoxy-2'-fluoroadenosine-3'-phosphate
  modified_base 15: mod_base = OTHER; note = 2'-O-methyladenosine-3'-phosphate
  modified_base 16: mod_base = OTHER; note = 2'-deoxy-2'-fluoroguanosine-3'-phosphate
  modified_base 17: mod_base = OTHER; note = 2'-O-methylguanosine-3'-phosphate
  modified_base 18: mod_base = OTHER; note = 2'-O-methyluridine-3'-phosphate
  modified_base 19: mod_base = OTHER; note = 2'-O-methyluridine-3'-phosphate
  modified_base 20: mod_base = OTHER; note = 2'-O-methylcytidine-3'-phosphate
  modified_base 21: mod_base = OTHER; note = 2'-O-methyluridine-3'-phosphorothioate
  modified_base 22: mod_base = OTHER; note = 2'-O-methylcytidine-3'-phosphorothioate
  modified_base 23: mod_base = OTHER; note = 2'-O-methyluridine
atccacaccagggaaggttctct

SEQ ID NO: 426 - RNA, 23 nt, synthetic construct
  source 1..23: mol_type = other RNA
  modified_base 1: mod_base = OTHER; note = 2'-O-methyladenosine-3'-phosphorothioate
  modified_base 2: mod_base = OTHER; note = 2'-deoxy-2'-fluorocytidine-3'-phosphorothioate
  modified_base 3: mod_base = OTHER; note = 2'-O-methyluridine-3'-phosphate
  modified_base 4: mod_base = OTHER; note = 2'-O-methylguanosine-3'-phosphate
  modified_base 5: mod_base = OTHER; note = 2'-O-methylcytidine-3'-phosphate
  modified_base 6: mod_base = OTHER; note = 2'-deoxy-2'-fluorocytidine-3'-phosphate
  modified_base 7: mod_base = OTHER; note = 2'-O-methyluridine-3'-phosphate
  modified_base 8: mod_base = OTHER; note = 2'-deoxy-2'-fluorocytidine-3'-phosphate
  modified_base 9: mod_base = OTHER; note = 2'-deoxy-2'-fluorocytidine-3'-phosphate
  modified_base 10: mod_base = OTHER; note = 2'-O-methyladenosine-3'-phosphate
  modified_base 11: mod_base = OTHER; note = 2'-O-methylcytidine-3'-phosphate
  modified_base 12: mod_base = OTHER; note = 2'-O-methyladenosine-3'-phosphate
  modified_base 13: mod_base = OTHER; note = 2'-O-methylcytidine-3'-phosphate
  modified_base 14: mod_base = OTHER; note = 2'-deoxy-2'-fluorocytidine-3'-phosphate
  modified_base 15: mod_base = OTHER; note = 2'-O-methyladenosine-3'-phosphate
  modified_base 16: mod_base = OTHER; note = 2'-deoxy-2'-fluoroguanosine-3'-phosphate
  modified_base 17: mod_base = OTHER; note = 2'-O-methylguanosine-3'-phosphate
  modified_base 18: mod_base = OTHER; note = 2'-O-methylguanosine-3'-phosphate
  modified_base 19: mod_base = OTHER; note = 2'-O-methyladenosine-3'-phosphate
  modified_base 20: mod_base = OTHER; note = 2'-O-methyladenosine-3'-phosphate
  modified_base 21: mod_base = OTHER; note = 2'-O-methylguanosine-3'-phosphorothioate
  modified_base 22: mod_base = OTHER; note = 2'-O-methylguanosine-3'-phosphorothioate
  modified_base 23: mod_base = OTHER; note = 2'-O-methyluridine
actgcctccacaccagggaaggt

SEQ ID NO: 427 - RNA, 23 nt, synthetic construct
  source 1..23: mol_type = other RNA
  modified_base 1: mod_base = OTHER; note = 2'-O-methyladenosine-3'-phosphorothioate
  modified_base 2: mod_base = OTHER; note = 2'-deoxy-2'-fluoroadenosine-3'-phosphorothioate
  modified_base 3: mod_base = OTHER; note = 2'-O-methyladenosine-3'-phosphate
  modified_base 4: mod_base = OTHER; note = 2'-O-methylcytidine-3'-phosphate
  modified_base 5: mod_base = OTHER; note = 2'-O-methyladenosine-3'-phosphate
  modified_base 6: mod_base = OTHER; note = 2'-deoxy-2'-fluoroguanosine-3'-phosphate
  modified_base 7: mod_base = OTHER; note = 2'-O-methylguanosine-3'-phosphate
  modified_base 8: mod_base = OTHER; note = 2'-deoxy-2'-fluorouridine-3'-phosphate
  modified_base 9: mod_base = OTHER; note = 2'-deoxy-2'-fluorocytidine-3'-phosphate
  modified_base 10: mod_base = OTHER; note = 2'-O-methylcytidine-3'-phosphate
  modified_base 11: mod_base = OTHER; note = 2'-O-methylguanosine-3'-phosphate
  modified_base 12: mod_base = OTHER; note = 2'-O-methylguanosine-3'-phosphate
  modified_base 13: mod_base = OTHER; note = 2'-O-methyladenosine-3'-phosphate
  modified_base 14: mod_base = OTHER; note = 2'-deoxy-2'-fluoroguanosine-3'-phosphate
  modified_base 15: mod_base = OTHER; note = 2'-O-methylcytidine-3'-phosphate
  modified_base 16: mod_base = OTHER; note = 2'-deoxy-2'-fluoroadenosine-3'-phosphate
  modified_base 17: mod_base = OTHER; note = 2'-O-methyluridine-3'-phosphate
  modified_base 18: mod_base = OTHER; note = 2'-O-methylcytidine-3'-phosphate
  modified_base 19: mod_base = OTHER; note = 2'-O-methylcytidine-3'-phosphate
  modified_base 20: mod_base = OTHER; note = 2'-O-methyluridine-3'-phosphate
  modified_base 21: mod_base = OTHER; note = 2'-O-methylguanosine-3'-phosphorothioate
  modified_base 22: mod_base = OTHER; note = 2'-O-methylguanosine-3'-phosphorothioate
  modified_base 23: mod_base = OTHER; note = 2'-O-methylguanosine
aaacaggtccggagcatcctggg

SEQ ID NO: 428 - RNA, 23 nt, synthetic construct
  source 1..23: mol_type = other RNA
  modified_base 1: mod_base = OTHER; note = 2'-O-methyladenosine-3'-phosphorothioate
  modified_base 2: mod_base = OTHER; note = 2'-deoxy-2'-fluorocytidine-3'-phosphorothioate
  modified_base 3: mod_base = OTHER; note = 2'-O-methyladenosine-3'-phosphate
  modified_base 4: mod_base = OTHER; note = 2'-O-methylcytidine-3'-phosphate
  modified_base 5: mod_base = OTHER; note = 2'-O-methylguanosine-3'-phosphate
  modified_base 6: mod_base = OTHER; note = 2'-deoxy-2'-fluorouridine-3'-phosphate
  modified_base 7: mod_base = OTHER; note = 2'-O-methyladenosine-3'-phosphate
  modified_base 8: mod_base = OTHER; note = 2'-deoxy-2'-fluoroadenosine-3'-phosphate
  modified_base 9: mod_base = OTHER; note = 2'-deoxy-2'-fluorocytidine-3'-phosphate
  modified_base 10: mod_base = OTHER; note = 2'-O-methyladenosine-3'-phosphate
  modified_base 11: mod_base = OTHER; note = 2'-O-methylguanosine-3'-phosphate
  modified_base 12: mod_base = OTHER; note = 2'-O-methylguanosine-3'-phosphate
  modified_base 13: mod_base = OTHER; note = 2'-O-methyluridine-3'-phosphate
  modified_base 14: mod_base = OTHER; note = 2'-deoxy-2'-fluorocytidine-3'-phosphate
  modified_base 15: mod_base = OTHER; note = 2'-O-methylcytidine-3'-phosphate
  modified_base 16: mod_base = OTHER; note = 2'-deoxy-2'-fluoroguanosine-3'-phosphate
  modified_base 17: mod_base = OTHER; note = 2'-O-methylguanosine-3'-phosphate
  modified_base 18: mod_base = OTHER; note = 2'-O-methyladenosine-3'-phosphate
  modified_base 19: mod_base = OTHER; note = 2'-O-methylguanosine-3'-phosphate
  modified_base 20: mod_base = OTHER; note = 2'-O-methylcytidine-3'-phosphate
  modified_base 21: mod_base = OTHER; note = 2'-O-methyladenosine-3'-phosphorothioate
  modified_base 22: mod_base = OTHER; note = 2'-O-methyluridine-3'-phosphorothioate
  modified_base 23: mod_base = OTHER; note = 2'-O-methylcytidine
acacgtaacaggtccggagcatc

SEQ ID NO: 429 - RNA, 23 nt, synthetic construct
  source 1..23: mol_type = other RNA
  modified_base 1: mod_base = OTHER; note = 2'-O-methyladenosine-3'-phosphorothioate
  modified_base 2: mod_base = OTHER; note = 2'-deoxy-2'-fluoroadenosine-3'-phosphorothioate
  modified_base 3: mod_base = OTHER; note = 2'-O-methyladenosine-3'-phosphate
  modified_base 4: mod_base = OTHER; note = 2'-O-methylcytidine-3'-phosphate
  modified_base 5: mod_base = OTHER; note = 2'-O-methyladenosine-3'-phosphate
  modified_base 6: mod_base = OTHER; note = 2'-deoxy-2'-fluoroguanosine-3'-phosphate
  modified_base 7: mod_base = OTHER; note = 2'-O-methyladenosine-3'-phosphate
  modified_base 8: mod_base = OTHER; note = 2'-deoxy-2'-fluoroguanosine-3'-phosphate
  modified_base 9: mod_base = OTHER; note = 2'-deoxy-2'-fluorocytidine-3'-phosphate
  modified_base 10: mod_base = OTHER; note = 2'-O-methyladenosine-3'-phosphate
  modified_base 11: mod_base = OTHER; note = 2'-O-methylcytidine-3'-phosphate
  modified_base 12: mod_base = OTHER; note = 2'-O-methylguanosine-3'-phosphate
  modified_base 13: mod_base = OTHER; note = 2'-O-methyluridine-3'-phosphate
  modified_base 14: mod_base = OTHER; note = 2'-deoxy-2'-fluoroadenosine-3'-phosphate
  modified_base 15: mod_base = OTHER; note = 2'-O-methyladenosine-3'-phosphate
  modified_base 16: mod_base = OTHER; note = 2'-deoxy-2'-fluorocytidine-3'-phosphate
  modified_base 17: mod_base = OTHER; note = 2'-O-methyladenosine-3'-phosphate
  modified_base 18: mod_base = OTHER; note = 2'-O-methylguanosine-3'-phosphate
  modified_base 19: mod_base = OTHER; note = 2'-O-methylguanosine-3'-phosphate
  modified_base 20: mod_base = OTHER; note = 2'-O-methyluridine-3'-phosphate
  modified_base 21: mod_base = OTHER; note = 2'-O-methylcytidine-3'-phosphorothioate
  modified_base 22: mod_base = OTHER; note = 2'-O-methylcytidine-3'-phosphorothioate
  modified_base 23: mod_base = OTHER; note = 2'-O-methylguanosine
aaacagagcacgtaacaggtccg

SEQ ID NO: 430 - RNA, 23 nt, synthetic construct
  source 1..23: mol_type = other RNA
  modified_base 1: mod_base = OTHER; note = 2'-O-methyladenosine-3'-phosphorothioate
  modified_base 2: mod_base = OTHER; note = 2'-deoxy-2'-fluoroguanosine-3'-phosphorothioate
  modified_base 3: mod_base = OTHER; note = 2'-O-methylcytidine-3'-phosphate
  modified_base 4: mod_base = OTHER; note = 2'-O-methyluridine-3'-phosphate
  modified_base 5: mod_base = OTHER; note = 2'-O-methyluridine-3'-phosphate
  modified_base 6: mod_base = OTHER; note = 2'-deoxy-2'-fluoroguanosine-3'-phosphate
  modified_base 7: mod_base = OTHER; note = 2'-O-methylguanosine-3'-phosphate
  modified_base 8: mod_base = OTHER; note = 2'-deoxy-2'-fluoroguanosine-3'-phosphate
  modified_base 9: mod_base = OTHER; note = 2'-deoxy-2'-fluoroadenosine-3'-phosphate
  modified_base 10: mod_base = OTHER; note = 2'-O-methyladenosine-3'-phosphate
  modified_base 11: mod_base = OTHER; note = 2'-O-methylcytidine-3'-phosphate
  modified_base 12: mod_base = OTHER; note = 2'-O-methyladenosine-3'-phosphate
  modified_base 13: mod_base = OTHER; note = 2'-O-methylguanosine-3'-phosphate
  modified_base 14: mod_base = OTHER; note = 2'-deoxy-2'-fluoroadenosine-3'-phosphate
  modified_base 15: mod_base = OTHER; note = 2'-O-methylguanosine-3'-phosphate
  modified_base 16: mod_base = OTHER; note = 2'-deoxy-2'-fluorocytidine-3'-phosphate
  modified_base 17: mod_base = OTHER; note = 2'-O-methyladenosine-3'-phosphate
  modified_base 18: mod_base = OTHER; note = 2'-O-methylcytidine-3'-phosphate
  modified_base 19: mod_base = OTHER; note = 2'-O-methylguanosine-3'-phosphate
  modified_base 20: mod_base = OTHER; note = 2'-O-methyluridine-3'-phosphate
  modified_base 21: mod_base = OTHER; note = 2'-O-methyladenosine-3'-phosphorothioate
  modified_base 22: mod_base = OTHER; note = 2'-O-methyladenosine-3'-phosphorothioate
  modified_base 23: mod_base = OTHER; note = 2'-O-methylcytidine
agcttgggaacagagcacgtaac

SEQ ID NO: 431 - RNA, 23 nt, synthetic construct
  source 1..23: mol_type = other RNA
  modified_base 1: mod_base = OTHER; note = 2'-O-methyladenosine-3'-phosphorothioate
  modified_base 2: mod_base = OTHER; note = 2'-deoxy-2'-fluoroguanosine-3'-phosphorothioate
  modified_base 3: mod_base = OTHER; note = 2'-O-methyladenosine-3'-phosphate
  modified_base 4: mod_base = OTHER; note = 2'-O-methylcytidine-3'-phosphate
  modified_base 5: mod_base = OTHER; note = 2'-O-methylcytidine-3'-phosphate
  modified_base 6: mod_base = OTHER; note = 2'-deoxy-2'-fluoroadenosine-3'-phosphate
  modified_base 7: mod_base = OTHER; note = 2'-O-methylguanosine-3'-phosphate
  modified_base 8: mod_base = OTHER; note = 2'-deoxy-2'-fluorocytidine-3'-phosphate
  modified_base 9: mod_base = OTHER; note = 2'-deoxy-2'-fluorouridine-3'-phosphate
  modified_base 10: mod_base = OTHER; note = 2'-O-methyluridine-3'-phosphate
  modified_base 11: mod_base = OTHER; note = 2'-O-methylguanosine-3'-phosphate
  modified_base 12: mod_base = OTHER; note = 2'-O-methylguanosine-3'-phosphate
  modified_base 13: mod_base = OTHER; note = 2'-O-methylguanosine-3'-phosphate
  modified_base 14: mod_base = OTHER; note = 2'-deoxy-2'-fluoroadenosine-3'-phosphate
  modified_base 15: mod_base = OTHER; note = 2'-O-methyladenosine-3'-phosphate
  modified_base 16: mod_base = OTHER; note = 2'-deoxy-2'-fluorocytidine-3'-phosphate
  modified_base 17: mod_base = OTHER; note = 2'-O-methyladenosine-3'-phosphate
  modified_base 18: mod_base = OTHER; note = 2'-O-methylguanosine-3'-phosphate
  modified_base 19: mod_base = OTHER; note = 2'-O-methyladenosine-3'-phosphate
  modified_base 20: mod_base = OTHER; note = 2'-O-methylguanosine-3'-phosphate
  modified_base 21: mod_base = OTHER; note = 2'-O-methylcytidine-3'-phosphorothioate
  modified_base 22: mod_base = OTHER; note = 2'-O-methyladenosine-3'-phosphorothioate
  modified_base 23: mod_base = OTHER; note = 2'-O-methylcytidine
agaccagcttgggaacagagcac

SEQ ID NO: 432 - RNA, 23 nt, synthetic construct
  source 1..23: mol_type = other RNA
  modified_base 1: mod_base = OTHER; note = 2'-O-methyladenosine-3'-phosphorothioate
  modified_base 2: mod_base = OTHER; note = 2'-deoxy-2'-fluorocytidine-3'-phosphorothioate
  modified_base 3: mod_base = OTHER; note = 2'-O-methyladenosine-3'-phosphate
  modified_base 4: mod_base = OTHER; note = 2'-O-methyladenosine-3'-phosphate
  modified_base 5: mod_base = OTHER; note = 2'-O-methyladenosine-3'-phosphate
  modified_base 6: mod_base = OTHER; note = 2'-deoxy-2'-fluoroguanosine-3'-phosphate
  modified_base 7: mod_base = OTHER; note = 2'-O-methylcytidine-3'-phosphate
  modified_base 8: mod_base = OTHER; note = 2'-deoxy-2'-fluorouridine-3'-phosphate
  modified_base 9: mod_base = OTHER; note = 2'-deoxy-2'-fluorocytidine-3'-phosphate
  modified_base 10: mod_base = OTHER; note = 2'-O-methyladenosine-3'-phosphate
  modified_base 11: mod_base = OTHER; note = 2'-O-methylguanosine-3'-phosphate
  modified_base 12: mod_base = OTHER; note = 2'-O-methylguanosine-3'-phosphate
  modified_base 13: mod_base = OTHER; note = 2'-O-methylguanosine-3'-phosphate
  modified_base 14: mod_base = OTHER; note = 2'-deoxy-2'-fluoroadenosine-3'-phosphate
  modified_base 15: mod_base = OTHER; note = 2'-O-methylcytidine-3'-phosphate
  modified_base 16: mod_base = OTHER; note = 2'-deoxy-2'-fluorouridine-3'-phosphate
  modified_base 17: mod_base = OTHER; note = 2'-O-methylguanosine-3'-phosphate
  modified_base 18: mod_base = OTHER; note = 2'-O-methylcytidine-3'-phosphate
  modified_base 19: mod_base = OTHER; note = 2'-O-methylcytidine-3'-phosphate
  modified_base 20: mod_base = OTHER; note = 2'-O-methyladenosine-3'-phosphate
  modified_base 21: mod_base = OTHER; note = 2'-O-methylguanosine-3'-phosphorothioate
  modified_base 22: mod_base = OTHER; note = 2'-O-methylcytidine-3'-phosphorothioate
  modified_base 23: mod_base = OTHER; note = 2'-O-methylcytidine
acaaagctcagggactgccagcc

SEQ ID NO: 433 - RNA, 23 nt, synthetic construct
  source 1..23: mol_type = other RNA
  modified_base 1: mod_base = OTHER; note = 2'-O-methyladenosine-3'-phosphorothioate
  modified_base 2: mod_base = OTHER; note = 2'-deoxy-2'-fluorocytidine-3'-phosphorothioate
  modified_base 3: mod_base = OTHER; note = 2'-O-methylguanosine-3'-phosphate
  modified_base 4: mod_base = OTHER; note = 2'-O-methylcytidine-3'-phosphate
  modified_base 5: mod_base = OTHER; note = 2'-O-methylcytidine-3'-phosphate
  modified_base 6: mod_base = OTHER; note = 2'-deoxy-2'-fluoroadenosine-3'-phosphate
  modified_base 7: mod_base = OTHER; note = 2'-O-methyluridine-3'-phosphate
  modified_base 8: mod_base = OTHER; note = 2'-deoxy-2'-fluorocytidine-3'-phosphate
  modified_base 9: mod_base = OTHER; note = 2'-deoxy-2'-fluoroadenosine-3'-phosphate
  modified_base 10: mod_base = OTHER; note = 2'-O-methyladenosine-3'-phosphate
  modified_base 11: mod_base = OTHER; note = 2'-O-methyladenosine-3'-phosphate
  modified_base 12: mod_base = OTHER; note = 2'-O-methylguanosine-3'-phosphate
  modified_base 13: mod_base = OTHER; note = 2'-O-methylcytidine-3'-phosphate
  modified_base 14: mod_base = OTHER; note = 2'-deoxy-2'-fluorouridine-3'-phosphate
  modified_base 15: mod_base = OTHER; note = 2'-O-methylcytidine-3'-phosphate
  modified_base 16: mod_base = OTHER; note = 2'-deoxy-2'-fluoroadenosine-3'-phosphate
  modified_base 17: mod_base = OTHER; note = 2'-O-methylguanosine-3'-phosphate
  modified_base 18: mod_base = OTHER; note = 2'-O-methylguanosine-3'-phosphate
  modified_base 19: mod_base = OTHER; note = 2'-O-methylguanosine-3'-phosphate
  modified_base 20: mod_base = OTHER; note = 2'-O-methyladenosine-3'-phosphate
  modified_base 21: mod_base = OTHER; note = 2'-O-methylcytidine-3'-phosphorothioate
  modified_base 22: mod_base = OTHER; note = 2'-O-methyluridine-3'-phosphorothioate
  modified_base 23: mod_base = OTHER; note = 2'-O-methylguanosine
acgccatcaaagctcagggactg

SEQ ID NO: 434 - RNA, 23 nt, synthetic construct
  source 1..23: mol_type = other RNA
  modified_base 1: mod_base = OTHER; note = 2'-O-methyladenosine-3'-phosphorothioate
  modified_base 2: mod_base = OTHER; note = 2'-deoxy-2'-fluoroguanosine-3'-phosphorothioate
  modified_base 3: mod_base = OTHER; note = 2'-O-methyluridine-3'-phosphate
  modified_base 4: mod_base = OTHER; note = 2'-O-methylguanosine-3'-phosphate
  modified_base 5: mod_base = OTHER; note = 2'-O-methylcytidine-3'-phosphate
  modified_base 6: mod_base = OTHER; note = 2'-deoxy-2'-fluorocytidine-3'-phosphate
  modified_base 7: mod_base = OTHER; note = 2'-O-methylcytidine-3'-phosphate
  modified_base 8: mod_base = OTHER; note = 2'-deoxy-2'-fluorouridine-3'-phosphate
  modified_base 9: mod_base = OTHER; note = 2'-deoxy-2'-fluorouridine-3'-phosphate
  modified_base 10: mod_base = OTHER; note = 2'-O-methyladenosine-3'-phosphate
  modified_base 11: mod_base = OTHER; note = 2'-O-methyladenosine-3'-phosphate
  modified_base 12: mod_base = OTHER; note = 2'-O-methylguanosine-3'-phosphate
  modified_base 13: mod_base = OTHER; note = 2'-O-methylguanosine-3'-phosphate
  modified_base 14: mod_base = OTHER; note = 2'-deoxy-2'-fluorouridine-3'-phosphate
  modified_base 15: mod_base = OTHER; note = 2'-O-methylguanosine-3'-phosphate
  modified_base 16: mod_base = OTHER; note = 2'-deoxy-2'-fluoroguanosine-3'-phosphate
  modified_base 17: mod_base = OTHER; note = 2'-O-methyladenosine-3'-phosphate
  modified_base 18: mod_base = OTHER; note = 2'-O-methyladenosine-3'-phosphate
  modified_base 19: mod_base = OTHER; note = 2'-O-methylguanosine-3'-phosphate
  modified_base 20: mod_base = OTHER; note = 2'-O-methylguanosine-3'-phosphate
  modified_base 21: mod_base = OTHER; note = 2'-O-methylcytidine-3'-phosphorothioate
  modified_base 22: mod_base = OTHER; note = 2'-O-methylcytidine-3'-phosphorothioate
  modified_base 23: mod_base = OTHER; note = 2'-O-methylcytidine
agtgcccttaaggtggaaggccc

SEQ ID NO: 435 - RNA, 23 nt, synthetic construct
  source 1..23: mol_type = other RNA
  modified_base 1: mod_base = OTHER; note = 2'-O-methyladenosine-3'-phosphorothioate
  modified_base 2: mod_base = OTHER; note = 2'-deoxy-2'-fluorouridine-3'-phosphorothioate
  modified_base 3: mod_base = OTHER; note = 2'-O-methylcytidine-3'-phosphate
  modified_base 4: mod_base = OTHER; note = 2'-O-methyluridine-3'-phosphate
  modified_base 5: mod_base = OTHER; note = 2'-O-methylcytidine-3'-phosphate
  modified_base 6: mod_base = OTHER; note = 2'-deoxy-2'-fluorocytidine-3'-phosphate
  modified_base 7: mod_base = OTHER; note = 2'-O-methyluridine-3'-phosphate
  modified_base 8: mod_base = OTHER; note = 2'-deoxy-2'-fluoroguanosine-3'-phosphate
  modified_base 9: mod_base = OTHER; note = 2'-deoxy-2'-fluorouridine-3'-phosphate
  modified_base 10: mod_base = OTHER; note = 2'-O-methylguanosine-3'-phosphate
  modified_base 11: mod_base = OTHER; note = 2'-O-methylcytidine-3'-phosphate
  modified_base 12: mod_base = OTHER; note = 2'-O-methylcytidine-3'-phosphate
  modified_base 13: mod_base = OTHER; note = 2'-O-methylcytidine-3'-phosphate
  modified_base 14: mod_base = OTHER; note = 2'-deoxy-2'-fluorouridine-3'-phosphate
  modified_base 15: mod_base = OTHER; note = 2'-O-methyluridine-3'-phosphate
  modified_base 16: mod_base = OTHER; note = 2'-deoxy-2'-fluoroadenosine-3'-phosphate
  modified_base 17: mod_base = OTHER; note = 2'-O-methyladenosine-3'-phosphate
  modified_base 18: mod_base = OTHER; note = 2'-O-methylguanosine-3'-phosphate
  modified_base 19: mod_base = OTHER; note = 2'-O-methylguanosine-3'-phosphate
  modified_base 20: mod_base = OTHER; note = 2'-O-methyluridine-3'-phosphate
  modified_base 21: mod_base = OTHER; note = 2'-O-methylguanosine-3'-phosphorothioate
  modified_base 22: mod_base = OTHER; note = 2'-O-methylguanosine-3'-phosphorothioate
  modified_base 23: mod_base = OTHER; note = 2'-O-methyladenosine
atctcctgtgcccttaaggtgga

SEQ ID NO: 436 - RNA, 23 nt, synthetic construct
  source 1..23: mol_type = other RNA
  modified_base 1: mod_base = OTHER; note = 2'-O-methyladenosine-3'-phosphorothioate
  modified_base 2: mod_base = OTHER; note = 2'-deoxy-2'-fluoroguanosine-3'-phosphorothioate
  modified_base 3: mod_base = OTHER; note = 2'-O-methyluridine-3'-phosphate
  modified_base 4: mod_base = OTHER; note = 2'-O-methylguanosine-3'-phosphate
  modified_base 5: mod_base = OTHER; note = 2'-O-methyluridine-3'-phosphate
  modified_base 6: mod_base = OTHER; note = 2'-deoxy-2'-fluorocytidine-3'-phosphate
  modified_base 7: mod_base = OTHER; note = 2'-O-methyladenosine-3'-phosphate
  modified_base 8: mod_base = OTHER; note = 2'-deoxy-2'-fluoroguanosine-3'-phosphate
  modified_base 9: mod_base = OTHER; note = 2'-deoxy-2'-fluorocytidine-3'-phosphate
  modified_base 10: mod_base = OTHER; note = 2'-O-methyluridine-3'-phosphate
  modified_base 11: mod_base = OTHER; note = 2'-O-methylcytidine-3'-phosphate
  modified_base 12: mod_base = OTHER; note = 2'-O-methyluridine-3'-phosphate
  modified_base 13: mod_base = OTHER; note = 2'-O-methylcytidine-3'-phosphate
  modified_base 14: mod_base = OTHER; note = 2'-deoxy-2'-fluorocytidine-3'-phosphate
  modified_base 15: mod_base = OTHER; note = 2'-O-methyluridine-3'-phosphate
  modified_base 16: mod_base = OTHER; note = 2'-deoxy-2'-fluoroguanosine-3'-phosphate
  modified_base 17: mod_base = OTHER; note = 2'-O-methyluridine-3'-phosphate
  modified_base 18: mod_base = OTHER; note = 2'-O-methylguanosine-3'-phosphate
  modified_base 19: mod_base = OTHER; note = 2'-O-methylcytidine-3'-phosphate
  modified_base 20: mod_base = OTHER; note = 2'-O-methylcytidine-3'-phosphate
  modified_base 21: mod_base = OTHER; note = 2'-O-methylcytidine-3'-phosphorothioate
  modified_base 22: mod_base = OTHER; note = 2'-O-methyluridine-3'-phosphorothioate
  modified_base 23: mod_base = OTHER; note = 2'-O-methyluridine
agtgtcagctctcctgtgccctt

SEQ ID NO: 437 - RNA, 23 nt, synthetic construct
  source 1..23: mol_type = other RNA
  modified_base 1: mod_base = OTHER; note = 2'-O-methyladenosine-3'-phosphorothioate
  modified_base 2: mod_base = OTHER; note = 2'-deoxy-2'-fluoroadenosine-3'-phosphorothioate
  modified_base 3: mod_base = OTHER; note = 2'-O-methyladenosine-3'-phosphate
  modified_base 4: mod_base = OTHER; note = 2'-O-methylguanosine-3'-phosphate
  modified_base 5: mod_base = OTHER; note = 2'-O-methylguanosine-3'-phosphate
  modified_base 6: mod_base = OTHER; note = 2'-deoxy-2'-fluorocytidine-3'-phosphate
  modified_base 7: mod_base = OTHER; note = 2'-O-methylcytidine-3'-phosphate
  modified_base 8: mod_base = OTHER; note = 2'-deoxy-2'-fluorocytidine-3'-phosphate
  modified_base 9: mod_base = OTHER; note = 2'-deoxy-2'-fluoroguanosine-3'-phosphate
  modified_base 10: mod_base = OTHER; note = 2'-O-methyluridine-3'-phosphate
  modified_base 11: mod_base = OTHER; note = 2'-O-methylguanosine-3'-phosphate
  modified_base 12: mod_base = OTHER; note = 2'-O-methyluridine-3'-phosphate
  modified_base 13: mod_base = OTHER; note = 2'-O-methylcytidine-3'-phosphate
  modified_base 14: mod_base = OTHER; note = 2'-deoxy-2'-fluoroadenosine-3'-phosphate
  modified_base 15: mod_base = OTHER; note = 2'-O-methylguanosine-3'-phosphate
  modified_base 16: mod_base = OTHER; note = 2'-deoxy-2'-fluorocytidine-3'-phosphate
  modified_base 17: mod_base = OTHER; note = 2'-O-methyluridine-3'-phosphate
  modified_base 18: mod_base = OTHER; note = 2'-O-methylcytidine-3'-phosphate
  modified_base 19: mod_base = OTHER; note = 2'-O-methyluridine-3'-phosphate
  modified_base 20: mod_base = OTHER; note = 2'-O-methylcytidine-3'-phosphate
  modified_base 21: mod_base = OTHER; note = 2'-O-methylcytidine-3'-phosphorothioate
  modified_base 22: mod_base = OTHER; note = 2'-O-methyluridine-3'-phosphorothioate
  modified_base 23: mod_base = OTHER; note = 2'-O-methylguanosine
aaaggcccgtgtcagctctcctg

SEQ ID NO: 438 - RNA, 23 nt, synthetic construct
  source 1..23: mol_type = other RNA
  modified_base 1: mod_base = OTHER; note = 2'-O-methyladenosine-3'-phosphorothioate
  modified_base 2: mod_base = OTHER; note = 2'-deoxy-2'-fluoroguanosine-3'-phosphorothioate
  modified_base 3: mod_base = OTHER; note = 2'-O-methyladenosine-3'-phosphate
  modified_base 4: mod_base = OTHER; note = 2'-O-methyladenosine-3'-phosphate
  modified_base 5: mod_base = OTHER; note = 2'-O-methylcytidine-3'-phosphate
  modified_base 6: mod_base = OTHER; note = 2'-deoxy-2'-fluorocytidine-3'-phosphate
  modified_base 7: mod_base = OTHER; note = 2'-O-methyladenosine-3'-phosphate
  modified_base 8: mod_base = OTHER; note = 2'-deoxy-2'-fluoroguanosine-3'-phosphate
  modified_base 9: mod_base = OTHER; note = 2'-deoxy-2'-fluorocytidine-3'-phosphate
  modified_base 10: mod_base = OTHER; note = 2'-O-methyladenosine-3'-phosphate
  modified_base 11: mod_base = OTHER; note = 2'-O-methyladenosine-3'-phosphate
  modified_base 12: mod_base = OTHER; note = 2'-O-methylguanosine-3'-phosphate
  modified_base 13: mod_base = OTHER; note = 2'-O-methylguanosine-3'-phosphate
  modified_base 14: mod_base = OTHER; note = 2'-deoxy-2'-fluorocytidine-3'-phosphate
  modified_base 15: mod_base = OTHER; note = 2'-O-methylcytidine-3'-phosphate
  modified_base 16: mod_base = OTHER; note = 2'-deoxy-2'-fluorocytidine-3'-phosphate
  modified_base 17: mod_base = OTHER; note = 2'-O-methylguanosine-3'-phosphate
  modified_base 18: mod_base = OTHER; note = 2'-O-methyluridine-3'-phosphate
  modified_base 19: mod_base = OTHER; note = 2'-O-methylguanosine-3'-phosphate
  modified_base 20: mod_base = OTHER; note = 2'-O-methyluridine-3'-phosphate
  modified_base 21: mod_base = OTHER; note = 2'-O-methylcytidine-3'-phosphorothioate
  modified_base 22: mod_base = OTHER; note = 2'-O-methyladenosine-3'-phosphorothioate
  modified_base 23: mod_base = OTHER; note = 2'-O-methylguanosine
agaaccagcaaggcccgtgtcag

SEQ ID NO: 439 - RNA, 23 nt, synthetic construct
  source 1..23: mol_type = other RNA
  modified_base 1: mod_base = OTHER; note = 2'-O-methyladenosine-3'-phosphorothioate
  modified_base 2: mod_base = OTHER; note = 2'-deoxy-2'-fluoroadenosine-3'-phosphorothioate
  modified_base 3: mod_base = OTHER; note = 2'-O-methylcytidine-3'-phosphate
  modified_base 4: mod_base = OTHER; note = 2'-O-methyladenosine-3'-phosphate
  modified_base 5: mod_base = OTHER; note = 2'-O-methylguanosine-3'-phosphate
  modified_base 6: mod_base = OTHER; note = 2'-deoxy-2'-fluorocytidine-3'-phosphate
  modified_base 7: mod_base = OTHER; note = 2'-O-methylcytidine-3'-phosphate
  modified_base 8: mod_base = OTHER; note = 2'-deoxy-2'-fluoroguanosine-3'-phosphate
  modified_base 9: mod_base = OTHER; note = 2'-deoxy-2'-fluoroguanosine-3'-phosphate
  modified_base 10: mod_base = OTHER; note = 2'-O-methyladenosine-3'-phosphate
  modified_base 11: mod_base = OTHER; note = 2'-O-methylguanosine-3'-phosphate
  modified_base 12: mod_base = OTHER; note = 2'-O-methyladenosine-3'-phosphate
  modified_base 13: mod_base = OTHER; note = 2'-O-methyladenosine-3'-phosphate
  modified_base 14: mod_base = OTHER; note = 2'-deoxy-2'-fluorocytidine-3'-phosphate
  modified_base 15: mod_base = OTHER; note = 2'-O-methylcytidine-3'-phosphate
  modified_base 16: mod_base = OTHER; note = 2'-deoxy-2'-fluoroadenosine-3'-phosphate
  modified_base 17: mod_base = OTHER; note = 2'-O-methylguanosine-3'-phosphate
  modified_base 18: mod_base = OTHER; note = 2'-O-methylcytidine-3'-phosphate
  modified_base 19: mod_base = OTHER; note = 2'-O-methyladenosine-3'-phosphate
  modified_base 20: mod_base = OTHER; note = 2'-O-methyladenosine-3'-phosphate
  modified_base 21: mod_base = OTHER; note = 2'-O-methylguanosine-3'-phosphorothioate
  modified_base 22: mod_base = OTHER; note = 2'-O-methylguanosine-3'-phosphorothioate
  modified_base 23: mod_base = OTHER; note = 2'-O-methylcytidine
aacagccggagaaccagcaaggc

SEQ ID NO: 440 - RNA, 23 nt, synthetic construct
  source 1..23: mol_type = other RNA
  modified_base 1: mod_base = OTHER; note = 2'-O-methyladenosine-3'-phosphorothioate
  modified_base 2: mod_base = OTHER; note = 2'-deoxy-2'-fluoroadenosine-3'-phosphorothioate
  modified_base 3: mod_base = OTHER; note = 2'-O-methylguanosine-3'-phosphate
  modified_base 4: mod_base = OTHER; note = 2'-O-methylguanosine-3'-phosphate
  modified_base 5: mod_base = OTHER; note = 2'-O-methylcytidine-3'-phosphate
  modified_base 6: mod_base = OTHER; note = 2'-deoxy-2'-fluoroadenosine-3'-phosphate
  modified_base 7: mod_base = OTHER; note = 2'-O-methylcytidine-3'-phosphate
  modified_base 8: mod_base = OTHER; note = 2'-deoxy-2'-fluoroadenosine-3'-phosphate
  modified_base 9: mod_base = OTHER; note = 2'-deoxy-2'-fluorocytidine-3'-phosphate
  modified_base 10: mod_base = OTHER; note = 2'-O-methyladenosine-3'-phosphate
  modified_base 11: mod_base = OTHER; note = 2'-O-methylguanosine-3'-phosphate
  modified_base 12: mod_base = OTHER; note = 2'-O-methylcytidine-3'-phosphate
  modified_base 13: mod_base = OTHER; note = 2'-O-methylcytidine-3'-phosphate
  modified_base 14: mod_base = OTHER; note = 2'-deoxy-2'-fluoroguanosine-3'-phosphate
  modified_base 15: mod_base = OTHER; note = 2'-O-methylguanosine-3'-phosphate
  modified_base 16: mod_base = OTHER; note = 2'-deoxy-2'-fluoroadenosine-3'-phosphate
  modified_base 17: mod_base = OTHER; note = 2'-O-methylguanosine-3'-phosphate
  modified_base 18: mod_base = OTHER; note = 2'-O-methyladenosine-3'-phosphate
  modified_base 19: mod_base = OTHER; note = 2'-O-methyladenosine-3'-phosphate
  modified_base 20: mod_base = OTHER; note = 2'-O-methylcytidine-3'-phosphate
  modified_base 21: mod_base = OTHER; note = 2'-O-methylcytidine-3'-phosphorothioate
  modified_base 22: mod_base = OTHER; note = 2'-O-methyladenosine-3'-phosphorothioate
  modified_base 23: mod_base = OTHER; note = 2'-O-methylguanosine
aaggcacacagccggagaaccag

SEQ ID NO: 441 - RNA, 23 nt, synthetic construct
  source 1..23: mol_type = other RNA
  modified_base 1: mod_base = OTHER; note = 2'-O-methyladenosine-3'-phosphorothioate
  modified_base 2: mod_base = OTHER; note = 2'-deoxy-2'-fluoroadenosine-3'-phosphorothioate
  modified_base 3: mod_base = OTHER; note = 2'-O-methyladenosine-3'-phosphate
  modified_base 4: mod_base = OTHER; note = 2'-O-methylcytidine-3'-phosphate
  modified_base 5: mod_base = OTHER; note = 2'-O-methyladenosine-3'-phosphate
  modified_base 6: mod_base = OTHER; note = 2'-deoxy-2'-fluoroguanosine-3'-phosphate
  modified_base 7: mod_base = OTHER; note = 2'-O-methylcytidine-3'-phosphate
  modified_base 8: mod_base = OTHER; note = 2'-deoxy-2'-fluorocytidine-3'-phosphate
  modified_base 9: mod_base = OTHER; note = 2'-deoxy-2'-fluorocytidine-3'-phosphate
  modified_base 10: mod_base = OTHER; note = 2'-O-methylguanosine-3'-phosphate
  modified_base 11: mod_base = OTHER; note = 2'-O-methyluridine-3'-phosphate
  modified_base 12: mod_base = OTHER; note = 2'-O-methylguanosine-3'-phosphate
  modified_base 13: mod_base = OTHER; note = 2'-O-methyladenosine-3'-phosphate
  modified_base 14: mod_base = OTHER; note = 2'-deoxy-2'-fluoroguanosine-3'-phosphate
  modified_base 15: mod_base = OTHER; note = 2'-O-methyluridine-3'-phosphate
  modified_base 16: mod_base = OTHER; note = 2'-deoxy-2'-fluoroguanosine-3'-phosphate
  modified_base 17: mod_base = OTHER; note = 2'-O-methyladenosine-3'-phosphate
  modified_base 18: mod_base = OTHER; note = 2'-O-methylcytidine-3'-phosphate
  modified_base 19: mod_base = OTHER; note = 2'-O-methylguanosine-3'-phosphate
  modified_base 20: mod_base = OTHER; note = 2'-O-methyladenosine-3'-phosphate
  modified_base 21: mod_base = OTHER; note = 2'-O-methylguanosine-3'-phosphorothioate
  modified_base 22: mod_base = OTHER; note = 2'-O-methyluridine-3'-phosphorothioate
  modified_base 23: mod_base = OTHER; note = 2'-O-methylguanosine
aaacagcccgtgagtgacgagtg

SEQ ID NO: 442 - RNA, 23 nt, synthetic construct
  source 1..23: mol_type = other RNA
  modified_base 1: mod_base = OTHER; note = 2'-O-methyladenosine-3'-phosphorothioate
  modified_base 2: mod_base = OTHER; note = 2'-deoxy-2'-fluorocytidine-3'-phosphorothioate
  modified_base 3: mod_base = OTHER; note = 2'-O-methyluridine-3'-phosphate
  modified_base 4: mod_base = OTHER; note = 2'-O-methylguanosine-3'-phosphate
  modified_base 5: mod_base = OTHER; note = 2'-O-methylguanosine-3'-phosphate
  modified_base 6: mod_base = OTHER; note = 2'-deoxy-2'-fluoroadenosine-3'-phosphate
  modified_base 7: mod_base = OTHER; note = 2'-O-methylguanosine-3'-phosphate
  modified_base 8: mod_base = OTHER; note = 2'-deoxy-2'-fluorocytidine-3'-phosphate
  modified_base 9: mod_base = OTHER; note = 2'-deoxy-2'-fluoroadenosine-3'-phosphate
  modified_base 10: mod_base = OTHER; note = 2'-O-methyladenosine-3'-phosphate
  modified_base 11: mod_base = OTHER; note = 2'-O-methylcytidine-3'-phosphate
  modified_base 12: mod_base = OTHER; note = 2'-O-methyladenosine-3'-phosphate
  modified_base 13: mod_base = OTHER; note = 2'-O-methylguanosine-3'-phosphate
  modified_base 14: mod_base = OTHER; note = 2'-deoxy-2'-fluorocytidine-3'-phosphate
  modified_base 15: mod_base = OTHER; note = 2'-O-methylcytidine-3'-phosphate
  modified_base 16: mod_base = OTHER; note = 2'-deoxy-2'-fluorocytidine-3'-phosphate
  modified_base 17: mod_base = OTHER; note = 2'-O-methylguanosine-3'-phosphate
  modified_base 18: mod_base = OTHER; note = 2'-O-methyluridine-3'-phosphate
  modified_base 19: mod_base = OTHER; note = 2'-O-methylguanosine-3'-phosphate
  modified_base 20: mod_base = OTHER; note = 2'-O-methyladenosine-3'-phosphate
  modified_base 21: mod_base = OTHER; note = 2'-O-methylguanosine-3'-phosphorothioate
  modified_base 22: mod_base = OTHER; note = 2'-O-methyluridine-3'-phosphorothioate
  modified_base 23: mod_base = OTHER; note = 2'-O-methylguanosine
actggagcaacagcccgtgagtg

SEQ ID NO: 443 - RNA, 23 nt, synthetic construct
  source 1..23: mol_type = other RNA
  modified_base 1: mod_base = OTHER; note = 2'-O-methyladenosine-3'-phosphorothioate
  modified_base 2: mod_base = OTHER; note = 2'-deoxy-2'-fluorocytidine-3'-phosphorothioate
  modified_base 3: mod_base = OTHER; note = 2'-O-methylguanosine-3'-phosphate
  modified_base 4: mod_base = OTHER; note = 2'-O-methyladenosine-3'-phosphate
  modified_base 5: mod_base = OTHER; note = 2'-O-methylguanosine-3'-phosphate
  modified_base 6: mod_base = OTHER; note = 2'-deoxy-2'-fluoroadenosine-3'-phosphate
  modified_base 7: mod_base = OTHER; note = 2'-O-methylcytidine-3'-phosphate
  modified_base 8: mod_base = OTHER; note = 2'-deoxy-2'-fluorocytidine-3'-phosphate
  modified_base 9: mod_base = OTHER; note = 2'-deoxy-2'-fluoroadenosine-3'-phosphate
  modified_base 10: mod_base = OTHER; note = 2'-O-methylguanosine-3'-phosphate
  modified_base 11: mod_base = OTHER; note = 2'-O-methylguanosine-3'-phosphate
  modified_base 12: mod_base = OTHER; note = 2'-O-methylcytidine-3'-phosphate
  modified_base 13: mod_base = OTHER; note = 2'-O-methylcytidine-3'-phosphate
  modified_base 14: mod_base = OTHER; note = 2'-deoxy-2'-fluorouridine-3'-phosphate
  modified_base 15: mod_base = OTHER; note = 2'-O-methylguanosine-3'-phosphate
  modified_base 16: mod_base = OTHER; note = 2'-deoxy-2'-fluoroguanosine-3'-phosphate
  modified_base 17: mod_base = OTHER; note = 2'-O-methyladenosine-3'-phosphate
  modified_base 18: mod_base = OTHER; note = 2'-O-methylguanosine-3'-phosphate
  modified_base 19: mod_base = OTHER; note = 2'-O-methylcytidine-3'-phosphate
  modified_base 20: mod_base = OTHER; note = 2'-O-methyladenosine-3'-phosphate
  modified_base 21: mod_base = OTHER; note = 2'-O-methyladenosine-3'-phosphorothioate
  modified_base 22: mod_base = OTHER; note = 2'-O-methylcytidine-3'-phosphorothioate
  modified_base 23: mod_base = OTHER; note = 2'-O-methyladenosine
acgagaccaggcctggagcaaca

SEQ ID NO: 444 - RNA, 23 nt, synthetic construct
  source 1..23: mol_type = other RNA
  modified_base 1: mod_base = OTHER; note = 2'-O-methyladenosine-3'-phosphorothioate
  modified_base 2: mod_base = OTHER; note = 2'-deoxy-2'-fluoroguanosine-3'-phosphorothioate
  modified_base 3: mod_base = OTHER; note = 2'-O-methyladenosine-3'-phosphate
  modified_base 4: mod_base = OTHER; note = 2'-O-methylguanosine-3'-phosphate
  modified_base 5: mod_base = OTHER; note = 2'-O-methyladenosine-3'-phosphate
  modified_base 6: mod_base = OTHER; note = 2'-deoxy-2'-fluoroadenosine-3'-phosphate
  modified_base 7: mod_base = OTHER; note = 2'-O-methyladenosine-3'-phosphate
  modified_base 8: mod_base = OTHER; note = 2'-deoxy-2'-fluorouridine-3'-phosphate
  modified_base 9: mod_base = OTHER; note = 2'-deoxy-2'-fluoroguanosine-3'-phosphate
  modified_base 10: mod_base = OTHER; note = 2'-O-methylcytidine-3'-phosphate
  modified_base 11: mod_base = OTHER; note = 2'-O-methylguanosine-3'-phosphate
  modified_base 12: mod_base = OTHER; note = 2'-O-methylcytidine-3'-phosphate
  modified_base 13: mod_base = OTHER; note = 2'-O-methylcytidine-3'-phosphate
  modified_base 14: mod_base = OTHER; note = 2'-deoxy-2'-fluorouridine-3'-phosphate
  modified_base 15: mod_base = OTHER; note = 2'-O-methylguanosine-3'-phosphate
  modified_base 16: mod_base = OTHER; note = 2'-deoxy-2'-fluoroadenosine-3'-phosphate
  modified_base 17: mod_base = OTHER; note = 2'-O-methylguanosine-3'-phosphate
  modified_base 18: mod_base = OTHER; note = 2'-O-methyladenosine-3'-phosphate
  modified_base 19: mod_base = OTHER; note = 2'-O-methylguanosine-3'-phosphate
  modified_base 20: mod_base = OTHER; note = 2'-O-methylcytidine-3'-phosphate
  modified_base 21: mod_base = OTHER; note = 2'-O-methylcytidine-3'-phosphorothioate
  modified_base 22: mod_base = OTHER; note = 2'-O-methylguanosine-3'-phosphorothioate
  modified_base 23: mod_base = OTHER; note = 2'-O-methylguanosine
agagaaatgcgcctgagagccgg

SEQ ID NO: 445 - RNA, 23 nt, synthetic construct
  source 1..23: mol_type = other RNA
  modified_base 1: mod_base = OTHER; note = 2'-O-methyladenosine-3'-phosphorothioate
  modified_base 2: mod_base = OTHER; note = 2'-deoxy-2'-fluoroguanosine-3'-phosphorothioate
  modified_base 3: mod_base = OTHER; note = 2'-O-methylcytidine-3'-phosphate
  modified_base 4: mod_base = OTHER; note = 2'-O-methyluridine-3'-phosphate
  modified_base 5: mod_base = OTHER; note = 2'-O-methylcytidine-3'-phosphate
  modified_base 6: mod_base = OTHER; note = 2'-deoxy-2'-fluoroguanosine-3'-phosphate
  modified_base 7: mod_base = OTHER; note = 2'-O-methylguanosine-3'-phosphate
  modified_base 8: mod_base = OTHER; note = 2'-deoxy-2'-fluoroadenosine-3'-phosphate
  modified_base 9: mod_base = OTHER; note = 2'-deoxy-2'-fluoroguanosine-3'-phosphate
  modified_base 10: mod_base = OTHER; note = 2'-O-methyladenosine-3'-phosphate
  modified_base 11: mod_base = OTHER; note = 2'-O-methyladenosine-3'-phosphate
  modified_base 12: mod_base = OTHER; note = 2'-O-methyladenosine-3'-phosphate
  modified_base 13: mod_base = OTHER; note = 2'-O-methyluridine-3'-phosphate
  modified_base 14: mod_base = OTHER; note = 2'-deoxy-2'-fluoroguanosine-3'-phosphate
  modified_base 15: mod_base = OTHER; note = 2'-O-methylcytidine-3'-phosphate
  modified_base 16: mod_base = OTHER; note = 2'-deoxy-2'-fluoroguanosine-3'-phosphate
  modified_base 17: mod_base = OTHER; note = 2'-O-methylcytidine-3'-phosphate
  modified_base 18: mod_base = OTHER; note = 2'-O-methylcytidine-3'-phosphate
  modified_base 19: mod_base = OTHER; note = 2'-O-methyluridine-3'-phosphate
  modified_base 20: mod_base = OTHER; note = 2'-O-methylguanosine-3'-phosphate
  modified_base 21: mod_base = OTHER; note = 2'-O-methyladenosine-3'-phosphorothioate
  modified_base 22: mod_base = OTHER; note = 2'-O-methylguanosine-3'-phosphorothioate
  modified_base 23: mod_base = OTHER; note = 2'-O-methyladenosine
agctcggagaaatgcgcctgaga

SEQ ID NO: 446 - RNA, 23 nt, synthetic construct
  source 1..23: mol_type = other RNA
  modified_base 1: mod_base = OTHER; note = 2'-O-methyladenosine-3'-phosphorothioate
  modified_base 2: mod_base = OTHER; note = 2'-deoxy-2'-fluorocytidine-3'-phosphorothioate
  modified_base 3: mod_base = OTHER; note = 2'-O-methylguanosine-3'-phosphate
  modified_base 4: mod_base = OTHER; note = 2'-O-methylguanosine-3'-phosphate
  modified_base 5: mod_base = OTHER; note = 2'-O-methyladenosine-3'-phosphate
  modified_base 6: mod_base = OTHER; note = 2'-deoxy-2'-fluorouridine-3'-phosphate
  modified_base 7: mod_base = OTHER; note = 2'-O-methylguanosine-3'-phosphate
  modified_base 8: mod_base = OTHER; note = 2'-deoxy-2'-fluorocytidine-3'-phosphate
  modified_base 9: mod_base = OTHER; note = 2'-deoxy-2'-fluorouridine-3'-phosphate
  modified_base 10: mod_base = OTHER; note = 2'-O-methylcytidine-3'-phosphate
  modified_base 11: mod_base = OTHER; note = 2'-O-methylguanosine-3'-phosphate
  modified_base 12: mod_base = OTHER; note = 2'-O-methylguanosine-3'-phosphate
  modified_base 13: mod_base = OTHER; note = 2'-O-methyladenosine-3'-phosphate
  modified_base 14: mod_base = OTHER; note = 2'-deoxy-2'-fluoroguanosine-3'-phosphate
  modified_base 15: mod_base = OTHER; note = 2'-O-methyladenosine-3'-phosphate
  modified_base 16: mod_base = OTHER; note = 2'-deoxy-2'-fluoroadenosine-3'-phosphate
  modified_base 17: mod_base = OTHER; note = 2'-O-methyladenosine-3'-phosphate
  modified_base 18: mod_base = OTHER; note = 2'-O-methyluridine-3'-phosphate
  modified_base 19: mod_base = OTHER; note = 2'-O-methylguanosine-3'-phosphate
  modified_base 20: mod_base = OTHER; note = 2'-O-methylcytidine-3'-phosphate
  modified_base 21: mod_base = OTHER; note = 2'-O-methylguanosine-3'-phosphorothioate
  modified_base 22: mod_base = OTHER; note = 2'-O-methylcytidine-3'-phosphorothioate
  modified_base 23: mod_base = OTHER; note = 2'-O-methylcytidine
acggatgctcggagaaatgcgcc

SEQ ID NO: 447 - RNA, 23 nt, synthetic construct
  source 1..23: mol_type = other RNA
  modified_base 1: mod_base = OTHER; note = 2'-O-methyladenosine-3'-phosphorothioate
  modified_base 2: mod_base = OTHER; note = 2'-deoxy-2'-fluoroadenosine-3'-phosphorothioate
  modified_base 3: mod_base = OTHER; note = 2'-O-methyluridine-3'-phosphate
  modified_base 4: mod_base = OTHER; note = 2'-O-methyladenosine-3'-phosphate
  modified_base 5: mod_base = OTHER; note = 2'-O-methylguanosine-3'-phosphate
  modified_base 6: mod_base = OTHER; note = 2'-deoxy-2'-fluoroadenosine-3'-phosphate
  modified_base 7: mod_base = OTHER; note = 2'-O-methylcytidine-3'-phosphate
  modified_base 8: mod_base = OTHER; note = 2'-deoxy-2'-fluoroguanosine-3'-phosphate
  modified_base 9: mod_base = OTHER; note = 2'-deoxy-2'-fluoroguanosine-3'-phosphate
  modified_base 10: mod_base = OTHER; note = 2'-O-methyladenosine-3'-phosphate
  modified_base 11: mod_base = OTHER; note = 2'-O-methyluridine-3'-phosphate
  modified_base 12: mod_base = OTHER; note = 2'-O-methylguanosine-3'-phosphate
  modified_base 13: mod_base = OTHER; note = 2'-O-methylcytidine-3'-phosphate
  modified_base 14: mod_base = OTHER; note = 2'-deoxy-2'-fluorouridine-3'-phosphate
  modified_base 15: mod_base = OTHER; note = 2'-O-methylcytidine-3'-phosphate
  modified_base 16: mod_base = OTHER; note = 2'-deoxy-2'-fluoroguanosine-3'-phosphate
  modified_base 17: mod_base = OTHER; note = 2'-O-methylguanosine-3'-phosphate
  modified_base 18: mod_base = OTHER; note = 2'-O-methyladenosine-3'-phosphate
  modified_base 19: mod_base = OTHER; note = 2'-O-methylguanosine-3'-phosphate
  modified_base 20: mod_base = OTHER; note = 2'-O-methyladenosine-3'-phosphate
  modified_base 21: mod_base = OTHER; note = 2'-O-methyladenosine-3'-phosphorothioate
  modified_base 22: mod_base = OTHER; note = 2'-O-methyladenosine-3'-phosphorothioate
  modified_base 23: mod_base = OTHER; note = 2'-O-methyluridine
aatagacggatgctcggagaaat

SEQ ID NO: 448 - RNA, 23 nt, synthetic construct
  source 1..23: mol_type = other RNA
  modified_base 1: mod_base = OTHER; note = 2'-O-methyladenosine-3'-phosphorothioate
  modified_base 2: mod_base = OTHER; note = 2'-deoxy-2'-fluorocytidine-3'-phosphorothioate
  modified_base 3: mod_base = OTHER; note = 2'-O-methyluridine-3'-phosphate
  modified_base 4: mod_base = OTHER; note = 2'-O-methylguanosine-3'-phosphate
  modified_base 5: mod_base = OTHER; note = 2'-O-methylcytidine-3'-phosphate
  modified_base 6: mod_base = OTHER; note = 2'-deoxy-2'-fluorocytidine-3'-phosphate
  modified_base 7: mod_base = OTHER; note = 2'-O-methylcytidine-3'-phosphate
  modified_base 8: mod_base = OTHER; note = 2'-deoxy-2'-fluoroadenosine-3'-phosphate
  modified_base 9: mod_base = OTHER; note = 2'-deoxy-2'-fluorouridine-3'-phosphate
  modified_base 10: mod_base = OTHER; note = 2'-O-methyladenosine-3'-phosphate
  modified_base 11: mod_base = OTHER; note = 2'-O-methylguanosine-3'-phosphate
  modified_base 12: mod_base = OTHER; note = 2'-O-methyladenosine-3'-phosphate
  modified_base 13: mod_base = OTHER; note = 2'-O-methylcytidine-3'-phosphate
  modified_base 14: mod_base = OTHER; note = 2'-deoxy-2'-fluoroguanosine-3'-phosphate
  modified_base 15: mod_base = OTHER; note = 2'-O-methylguanosine-3'-phosphate
  modified_base 16: mod_base = OTHER; note = 2'-deoxy-2'-fluoroadenosine-3'-phosphate
  modified_base 17: mod_base = OTHER; note = 2'-O-methyluridine-3'-phosphate
  modified_base 18: mod_base = OTHER; note = 2'-O-methylguanosine-3'-phosphate
  modified_base 19: mod_base = OTHER; note = 2'-O-methylcytidine-3'-phosphate
  modified_base 20: mod_base = OTHER; note = 2'-O-methyluridine-3'-phosphate
  modified_base 21: mod_base = OTHER; note = 2'-O-methylcytidine-3'-phosphorothioate
  modified_base 22: mod_base = OTHER; note = 2'-O-methylguanosine-3'-phosphorothioate
  modified_base 23: mod_base = OTHER; note = 2'-O-methylguanosine
actgcccatagacggatgctcgg

SEQ ID NO: 449 - RNA, 23 nt, synthetic construct
  source 1..23: mol_type = other RNA
  modified_base 1: mod_base = OTHER; note = 2'-O-methyladenosine-3'-phosphorothioate
  modified_base 2: mod_base = OTHER; note = 2'-deoxy-2'-fluoroadenosine-3'-phosphorothioate
  modified_base 3: mod_base = OTHER; note = 2'-O-methylcytidine-3'-phosphate
  modified_base 4: mod_base = OTHER; note = 2'-O-methyladenosine-3'-phosphate
  modified_base 5: mod_base = OTHER; note = 2'-O-methyladenosine-3'-phosphate
  modified_base 6: mod_base = OTHER; note = 2'-deoxy-2'-fluoroadenosine-3'-phosphate
  modified_base 7: mod_base = OTHER; note = 2'-O-methylcytidine-3'-phosphate
  modified_base 8: mod_base = OTHER; note = 2'-deoxy-2'-fluorouridine-3'-phosphate
  modified_base 9: mod_base = OTHER; note = 2'-deoxy-2'-fluoroguanosine-3'-phosphate
  modified_base 10: mod_base = OTHER; note = 2'-O-methylcytidine-3'-phosphate
  modified_base 11: mod_base = OTHER; note = 2'-O-methylcytidine-3'-phosphate
  modified_base 12: mod_base = OTHER; note = 2'-O-methylcytidine-3'-phosphate
  modified_base 13: mod_base = OTHER; note = 2'-O-methyladenosine-3'-phosphate
  modified_base 14: mod_base = OTHER; note = 2'-deoxy-2'-fluorouridine-3'-phosphate
  modified_base 15: mod_base = OTHER; note = 2'-O-methyladenosine-3'-phosphate
  modified_base 16: mod_base = OTHER; note = 2'-deoxy-2'-fluoroguanosine-3'-phosphate
  modified_base 17: mod_base = OTHER; note = 2'-O-methyladenosine-3'-phosphate
  modified_base 18: mod_base = OTHER; note = 2'-O-methylcytidine-3'-phosphate
  modified_base 19: mod_base = OTHER; note = 2'-O-methylguanosine-3'-phosphate
  modified_base 20: mod_base = OTHER; note = 2'-O-methylguanosine-3'-phosphate
  modified_base 21: mod_base = OTHER; note = 2'-O-methyladenosine-3'-phosphorothioate
  modified_base 22: mod_base = OTHER; note = 2'-O-methyluridine-3'-phosphorothioate
  modified_base 23: mod_base = OTHER; note = 2'-O-methylguanosine
aacaaactgcccatagacggatg

SEQ ID NO: 450 - RNA, 23 nt, synthetic construct
  source 1..23: mol_type = other RNA
  modified_base 1: mod_base = OTHER; note = 2'-O-methyladenosine-3'-phosphorothioate
  modified_base 2: mod_base = OTHER; note = 2'-deoxy-2'-fluorocytidine-3'-phosphorothioate
  modified_base 3: mod_base = OTHER; note = 2'-O-methylcytidine-3'-phosphate
  modified_base 4: mod_base = OTHER; note = 2'-O-methyladenosine-3'-phosphate
  modified_base 5: mod_base = OTHER; note = 2'-O-methylguanosine-3'-phosphate
  modified_base 6: mod_base = OTHER; note = 2'-deoxy-2'-fluorocytidine-3'-phosphate
  modified_base 7: mod_base = OTHER; note = 2'-O-methylcytidine-3'-phosphate
  modified_base 8: mod_base = OTHER; note = 2'-deoxy-2'-fluoroadenosine-3'-phosphate
  modified_base 9: mod_base = OTHER; note = 2'-deoxy-2'-fluorocytidine-3'-phosphate
  modified_base 10: mod_base = OTHER; note = 2'-O-methyladenosine-3'-phosphate
  modified_base 11: mod_base = OTHER; note = 2'-O-methyladenosine-3'-phosphate
  modified_base 12: mod_base = OTHER; note = 2'-O-methyladenosine-3'-phosphate
  modified_base 13: mod_base = OTHER; note = 2'-O-methylcytidine-3'-phosphate
  modified_base 14: mod_base = OTHER; note = 2'-deoxy-2'-fluorouridine-3'-phosphate
  modified_base 15: mod_base = OTHER; note = 2'-O-methylguanosine-3'-phosphate
  modified_base 16: mod_base = OTHER; note = 2'-deoxy-2'-fluorocytidine-3'-phosphate
  modified_base 17: mod_base = OTHER; note = 2'-O-methylcytidine-3'-phosphate
  modified_base 18: mod_base = OTHER; note = 2'-O-methylcytidine-3'-phosphate
  modified_base 19: mod_base = OTHER; note = 2'-O-methyladenosine-3'-phosphate
  modified_base 20: mod_base = OTHER; note = 2'-O-methyluridine-3'-phosphate
  modified_base 21: mod_base = OTHER; note = 2'-O-methyladenosine-3'-phosphorothioate
  modified_base 22: mod_base = OTHER; note = 2'-O-methylguanosine-3'-phosphorothioate
  modified_base 23: mod_base = OTHER; note = 2'-O-methyladenosine
accagccacaaactgcccataga

SEQ ID NO: 451 - RNA, 23 nt, synthetic construct
  source 1..23: mol_type = other RNA
  modified_base 1: mod_base = OTHER; note = 2'-O-methyladenosine-3'-phosphorothioate
  modified_base 2: mod_base = OTHER; note = 2'-deoxy-2'-fluoroguanosine-3'-phosphorothioate
  modified_base 3: mod_base = OTHER; note = 2'-O-methyluridine-3'-phosphate
  modified_base 4: mod_base = OTHER; note = 2'-O-methylcytidine-3'-phosphate
  modified_base 5: mod_base = OTHER; note = 2'-O-methyluridine-3'-phosphate
  modified_base 6: mod_base = OTHER; note = 2'-deoxy-2'-fluorocytidine-3'-phosphate
  modified_base 7: mod_base = OTHER; note = 2'-O-methyladenosine-3'-phosphate
  modified_base 8: mod_base = OTHER; note = 2'-deoxy-2'-fluorocytidine-3'-phosphate
  modified_base 9: mod_base = OTHER; note = 2'-deoxy-2'-fluorocytidine-3'-phosphate
  modified_base 10: mod_base = OTHER; note = 2'-O-methyladenosine-3'-phosphate
  modified_base 11: mod_base = OTHER; note = 2'-O-methylguanosine-3'-phosphate
  modified_base 12: mod_base = OTHER; note = 2'-O-methylcytidine-3'-phosphate
  modified_base 13: mod_base = OTHER; note = 2'-O-methylcytidine-3'-phosphate
  modified_base 14: mod_base = OTHER; note = 2'-deoxy-2'-fluoroadenosine-3'-phosphate
  modified_base 15: mod_base = OTHER; note = 2'-O-methylcytidine-3'-phosphate
  modified_base 16: mod_base = OTHER; note = 2'-deoxy-2'-fluoroadenosine-3'-phosphate
  modified_base 17: mod_base = OTHER; note = 2'-O-methyladenosine-3'-phosphate
  modified_base 18: mod_base = OTHER; note = 2'-O-methyladenosine-3'-phosphate
  modified_base 19: mod_base = OTHER; note = 2'-O-methylcytidine-3'-phosphate
  modified_base 20: mod_base = OTHER; note = 2'-O-methyluridine-3'-phosphate
  modified_base 21: mod_base = OTHER; note = 2'-O-methylguanosine-3'-phosphorothioate
  modified_base 22: mod_base = OTHER; note = 2'-O-methylcytidine-3'-phosphorothioate
  modified_base 23: mod_base = OTHER; note = 2'-O-methylcytidine
agtctcaccagccacaaactgcc

SEQ ID NO: 452 - RNA, 23 nt, synthetic construct
  source 1..23: mol_type = other RNA
  modified_base 1: mod_base = OTHER; note = 2'-O-methyladenosine-3'-phosphorothioate
  modified_base 2: mod_base = OTHER; note = 2'-deoxy-2'-fluorocytidine-3'-phosphorothioate
  modified_base 3: mod_base = OTHER; note = 2'-O-methyluridine-3'-phosphate
  modified_base 4: mod_base = OTHER; note = 2'-O-methylcytidine-3'-phosphate
  modified_base 5: mod_base = OTHER; note = 2'-O-methyluridine-3'-phosphate
  modified_base 6: mod_base = OTHER; note = 2'-deoxy-2'-fluoroguanosine-3'-phosphate
  modified_base 7: mod_base = OTHER; note = 2'-O-methylcytidine-3'-phosphate
  modified_base 8: mod_base = OTHER; note = 2'-deoxy-2'-fluorouridine-3'-phosphate
  modified_base 9: mod_base = OTHER; note = 2'-deoxy-2'-fluoroguanosine-3'-phosphate
  modified_base 10: mod_base = OTHER; note = 2'-O-methyluridine-3'-phosphate
  modified_base 11: mod_base = OTHER; note = 2'-O-methylcytidine-3'-phosphate
  modified_base 12: mod_base = OTHER; note = 2'-O-methyluridine-3'-phosphate
  modified_base 13: mod_base = OTHER; note = 2'-O-methylcytidine-3'-phosphate
  modified_base 14: mod_base = OTHER; note = 2'-deoxy-2'-fluoroadenosine-3'-phosphate
  modified_base 15: mod_base = OTHER; note = 2'-O-methylcytidine-3'-phosphate
  modified_base 16: mod_base = OTHER; note = 2'-deoxy-2'-fluorocytidine-3'-phosphate
  modified_base 17: mod_base = OTHER; note = 2'-O-methyladenosine-3'-phosphate
  modified_base 18: mod_base = OTHER; note = 2'-O-methylguanosine-3'-phosphate
  modified_base 19: mod_base = OTHER; note = 2'-O-methylcytidine-3'-phosphate
  modified_base 20: mod_base = OTHER; note = 2'-O-methylcytidine-3'-phosphate
  modified_base 21: mod_base = OTHER; note = 2'-O-methyladenosine-3'-phosphorothioate
  modified_base 22: mod_base = OTHER; note = 2'-O-methylcytidine-3'-phosphorothioate
  modified_base 23: mod_base = OTHER; note = 2'-O-methyladenosine
actctgctgtctcaccagccaca

SEQ ID NO: 453 - RNA, 23 nt, synthetic construct
  source 1..23: mol_type = other RNA
  modified_base 1: mod_base = OTHER; note = 2'-O-methyladenosine-3'-phosphorothioate
  modified_base 2: mod_base = OTHER; note = 2'-deoxy-2'-fluorocytidine-3'-phosphorothioate
  modified_base 3: mod_base = OTHER; note = 2'-O-methyladenosine-3'-phosphate
  modified_base 4: mod_base = OTHER; note = 2'-O-methylcytidine-3'-phosphate
  modified_base 5: mod_base = OTHER; note = 2'-O-methylcytidine-3'-phosphate
  modified_base 6: mod_base = OTHER; note = 2'-deoxy-2'-fluorouridine-3'-phosphate
  modified_base 7: mod_base = OTHER; note = 2'-O-methylcytidine-3'-phosphate
  modified_base 8: mod_base = OTHER; note = 2'-deoxy-2'-fluorocytidine-3'-phosphate
  modified_base 9: mod_base = OTHER; note = 2'-deoxy-2'-fluorouridine-3'-phosphate
  modified_base 10: mod_base = OTHER; note = 2'-O-methylcytidine-3'-phosphate
  modified_base 11: mod_base = OTHER; note = 2'-O-methyluridine-3'-phosphate
  modified_base 12: mod_base = OTHER; note = 2'-O-methylguanosine-3'-phosphate
  modified_base 13: mod_base = OTHER; note = 2'-O-methylcytidine-3'-phosphate
  modified_base 14: mod_base = OTHER; note = 2'-deoxy-2'-fluorouridine-3'-phosphate
  modified_base 15: mod_base = OTHER; note = 2'-O-methylguanosine-3'-phosphate
  modified_base 16: mod_base = OTHER; note = 2'-deoxy-2'-fluorouridine-3'-phosphate
  modified_base 17: mod_base = OTHER; note = 2'-O-methylcytidine-3'-phosphate
  modified_base 18: mod_base = OTHER; note = 2'-O-methyluridine-3'-phosphate
  modified_base 19: mod_base = OTHER; note = 2'-O-methylcytidine-3'-phosphate
  modified_base 20: mod_base = OTHER; note = 2'-O-methyladenosine-3'-phosphate
  modified_base 21: mod_base = OTHER; note = 2'-O-methylcytidine-3'-phosphorothioate
  modified_base 22: mod_base = OTHER; note = 2'-O-methylcytidine-3'-phosphorothioate
  modified_base 23: mod_base = OTHER; note = 2'-O-methyladenosine
acacctcctctgctgtctcacca

SEQ ID NO: 454 - RNA, 23 nt, synthetic construct
  source 1..23: mol_type = other RNA
  modified_base 1: mod_base = OTHER; note = 2'-O-methyladenosine-3'-phosphorothioate
  modified_base 2: mod_base = OTHER; note = 2'-deoxy-2'-fluoroadenosine-3'-phosphorothioate
  modified_base 3: mod_base = OTHER; note = 2'-O-methylguanosine-3'-phosphate
  modified_base 4: mod_base = OTHER; note = 2'-O-methylcytidine-3'-phosphate
  modified_base 5: mod_base = OTHER; note = 2'-O-methylcytidine-3'-phosphate
  modified_base 6: mod_base = OTHER; note = 2'-deoxy-2'-fluorocytidine-3'-phosphate
  modified_base 7: mod_base = OTHER; note = 2'-O-methyluridine-3'-phosphate
  modified_base 8: mod_base = OTHER; note = 2'-deoxy-2'-fluorouridine-3'-phosphate
  modified_base 9: mod_base = OTHER; note = 2'-deoxy-2'-fluorocytidine-3'-phosphate
  modified_base 10: mod_base = OTHER; note = 2'-O-methyladenosine-3'-phosphate
  modified_base 11: mod_base = OTHER; note = 2'-O-methylcytidine-3'-phosphate
  modified_base 12: mod_base = OTHER; note = 2'-O-methylcytidine-3'-phosphate
  modified_base 13: mod_base = OTHER; note = 2'-O-methyluridine-3'-phosphate
  modified_base 14: mod_base = OTHER; note = 2'-deoxy-2'-fluorocytidine-3'-phosphate
  modified_base 15: mod_base = OTHER; note = 2'-O-methylcytidine-3'-phosphate
  modified_base 16: mod_base = OTHER; note = 2'-deoxy-2'-fluorouridine-3'-phosphate
  modified_base 17: mod_base = OTHER; note = 2'-O-methylcytidine-3'-phosphate
  modified_base 18: mod_base = OTHER; note = 2'-O-methyluridine-3'-phosphate
  modified_base 19: mod_base = OTHER; note = 2'-O-methylguanosine-3'-phosphate
  modified_base 20: mod_base = OTHER; note = 2'-O-methylcytidine-3'-phosphate
  modified_base 21: mod_base = OTHER; note = 2'-O-methyluridine-3'-phosphorothioate
  modified_base 22: mod_base = OTHER; note = 2'-O-methylguanosine-3'-phosphorothioate
  modified_base 23: mod_base = OTHER; note = 2'-O-methyluridine
aagcccttcacctcctctgctgt

SEQ ID NO: 455 - RNA, 23 nt, synthetic construct
  source 1..23: mol_type = other RNA
  modified_base 1: mod_base = OTHER; note = 2'-O-methyladenosine-3'-phosphorothioate
  modified_base 2: mod_base = OTHER; note = 2'-deoxy-2'-fluorouridine-3'-phosphorothioate
  modified_base 3: mod_base = OTHER; note = 2'-O-methylguanosine-3'-phosphate
  modified_base 4: mod_base = OTHER; note = 2'-O-methylcytidine-3'-phosphate
  modified_base 5: mod_base = OTHER; note = 2'-O-methyladenosine-3'-phosphate
  modified_base 6: mod_base = OTHER; note = 2'-deoxy-2'-fluorocytidine-3'-phosphate
  modified_base 7: mod_base = OTHER; note = 2'-O-methylguanosine-3'-phosphate
  modified_base 8: mod_base = OTHER; note = 2'-deoxy-2'-fluorocytidine-3'-phosphate
  modified_base 9: mod_base = OTHER; note = 2'-deoxy-2'-fluoroadenosine-3'-phosphate
  modified_base 10: mod_base = OTHER; note = 2'-O-methylguanosine-3'-phosphate
  modified_base 11: mod_base = OTHER; note = 2'-O-methylcytidine-3'-phosphate
  modified_base 12: mod_base = OTHER; note = 2'-O-methylcytidine-3'-phosphate
  modified_base 13: mod_base = OTHER; note = 2'-O-methylcytidine-3'-phosphate
  modified_base 14: mod_base = OTHER; note = 2'-deoxy-2'-fluorouridine-3'-phosphate
  modified_base 15: mod_base = OTHER; note = 2'-O-methyluridine-3'-phosphate
  modified_base 16: mod_base = OTHER; note = 2'-deoxy-2'-fluorocytidine-3'-phosphate
  modified_base 17: mod_base = OTHER; note = 2'-O-methyladenosine-3'-phosphate
  modified_base 18: mod_base = OTHER; note = 2'-O-methylcytidine-3'-phosphate
  modified_base 19: mod_base = OTHER; note = 2'-O-methylcytidine-3'-phosphate
  modified_base 20: mod_base = OTHER; note = 2'-O-methyluridine-3'-phosphate
  modified_base 21: mod_base = OTHER; note = 2'-O-methylcytidine-3'-phosphorothioate
  modified_base 22: mod_base = OTHER; note = 2'-O-methylcytidine-3'-phosphorothioate
  modified_base 23: mod_base = OTHER; note = 2'-O-methyluridine
atgcacgcagcccttcacctcct

SEQ ID NO: 456 - RNA, 23 nt, synthetic construct
  source 1..23: mol_type = other RNA
  modified_base 1: mod_base = OTHER; note = 2'-O-methyladenosine-3'-phosphorothioate
  modified_base 2: mod_base = OTHER; note = 2'-deoxy-2'-fluoroadenosine-3'-phosphorothioate
  modified_base 3: mod_base = OTHER; note = 2'-O-methylguanosine-3'-phosphate
  modified_base 4: mod_base = OTHER; note = 2'-O-methylcytidine-3'-phosphate
  modified_base 5: mod_base = OTHER; note = 2'-O-methyluridine-3'-phosphate
  modified_base 6: mod_base = OTHER; note = 2'-deoxy-2'-fluoroguanosine-3'-phosphate
  modified_base 7: mod_base = OTHER; note = 2'-O-methylcytidine-3'-phosphate
  modified_base 8: mod_base = OTHER; note = 2'-deoxy-2'-fluorouridine-3'-phosphate
  modified_base 9: mod_base = OTHER; note = 2'-deoxy-2'-fluoroguanosine-3'-phosphate
  modified_base 10: mod_base = OTHER; note = 2'-O-methylcytidine-3'-phosphate
  modified_base 11: mod_base = OTHER; note = 2'-O-methyladenosine-3'-phosphate
  modified_base 12: mod_base = OTHER; note = 2'-O-methylcytidine-3'-phosphate
  modified_base 13: mod_base = OTHER; note = 2'-O-methylguanosine-3'-phosphate
  modified_base 14: mod_base = OTHER; note = 2'-deoxy-2'-fluorocytidine-3'-phosphate
  modified_base 15: mod_base = OTHER; note = 2'-O-methyladenosine-3'-phosphate
  modified_base 16: mod_base = OTHER; note = 2'-deoxy-2'-fluoroguanosine-3'-phosphate
  modified_base 17: mod_base = OTHER; note = 2'-O-methylcytidine-3'-phosphate
  modified_base 18: mod_base = OTHER; note = 2'-O-methylcytidine-3'-phosphate
  modified_base 19: mod_base = OTHER; note = 2'-O-methylcytidine-3'-phosphate
  modified_base 20: mod_base = OTHER; note = 2'-O-methyluridine-3'-phosphate
  modified_base 21: mod_base = OTHER; note = 2'-O-methyluridine-3'-phosphorothioate
  modified_base 22: mod_base = OTHER; note = 2'-O-methylcytidine-3'-phosphorothioate
  modified_base 23: mod_base = OTHER; note = 2'-O-methyladenosine
aagctgctgcacgcagcccttca

SEQ ID NO: 457 - RNA, 23 nt, synthetic construct
  source 1..23: mol_type = other RNA
  modified_base 1: mod_base = OTHER; note = 2'-O-methyladenosine-3'-phosphorothioate
  modified_base 2: mod_base = OTHER; note = 2'-deoxy-2'-fluorocytidine-3'-phosphorothioate
  modified_base 3: mod_base = OTHER; note = 2'-O-methyluridine-3'-phosphate
  modified_base 4: mod_base = OTHER; note = 2'-O-methylcytidine-3'-phosphate
  modified_base 5: mod_base = OTHER; note = 2'-O-methyladenosine-3'-phosphate
  modified_base 6: mod_base = OTHER; note = 2'-deoxy-2'-fluoroguanosine-3'-phosphate
  modified_base 7: mod_base = OTHER; note = 2'-O-methyluridine-3'-phosphate
  modified_base 8: mod_base = OTHER; note = 2'-deoxy-2'-fluoroguanosine-3'-phosphate
  modified_base 9: mod_base = OTHER; note = 2'-deoxy-2'-fluoroguanosine-3'-phosphate
  modified_base 10: mod_base = OTHER; note = 2'-O-methylguanosine-3'-phosphate
  modified_base 11: mod_base = OTHER; note = 2'-O-methylcytidine-3'-phosphate
  modified_base 12: mod_base = OTHER; note = 2'-O-methyladenosine-3'-phosphate
  modified_base 13: mod_base = OTHER; note = 2'-O-methylcytidine-3'-phosphate
  modified_base 14: mod_base = OTHER; note = 2'-deoxy-2'-fluorouridine-3'-phosphate
  modified_base 15: mod_base = OTHER; note = 2'-O-methylguanosine-3'-phosphate
  modified_base 16: mod_base = OTHER; note = 2'-deoxy-2'-fluorocytidine-3'-phosphate
  modified_base 17: mod_base = OTHER; note = 2'-O-methylcytidine-3'-phosphate
  modified_base 18: mod_base = OTHER; note = 2'-O-methyladenosine-3'-phosphate
  modified_base 19: mod_base = OTHER; note = 2'-O-methylguanosine-3'-phosphate
  modified_base 20: mod_base = OTHER; note = 2'-O-methylcytidine-3'-phosphate
  modified_base 21: mod_base = OTHER; note = 2'-O-methyladenosine-3'-phosphorothioate
  modified_base 22: mod_base = OTHER; note = 2'-O-methylguanosine-3'-phosphorothioate
  modified_base 23: mod_base = OTHER; note = 2'-O-methyluridine
actcagtgggcactgccagcagt

SEQ ID NO: 458 - RNA, 23 nt, synthetic construct
  source 1..23: mol_type = other RNA
  modified_base 1: mod_base = OTHER; note = 2'-O-methyladenosine-3'-phosphorothioate
  modified_base 2: mod_base = OTHER; note = 2'-deoxy-2'-fluorouridine-3'-phosphorothioate
  modified_base 3: mod_base = OTHER; note = 2'-O-methylcytidine-3'-phosphate
  modified_base 4: mod_base = OTHER; note = 2'-O-methylcytidine-3'-phosphate
  modified_base 5: mod_base = OTHER; note = 2'-O-methyluridine-3'-phosphate
  modified_base 6: mod_base = OTHER; note = 2'-deoxy-2'-fluorocytidine-3'-phosphate
  modified_base 7: mod_base = OTHER; note = 2'-O-methylcytidine-3'-phosphate
  modified_base 8: mod_base = OTHER; note = 2'-deoxy-2'-fluorouridine-3'-phosphate
  modified_base 9: mod_base = OTHER; note = 2'-deoxy-2'-fluorocytidine-3'-phosphate
  modified_base 10: mod_base = OTHER; note = 2'-O-methyladenosine-3'-phosphate
  modified_base 11: mod_base = OTHER; note = 2'-O-methylguanosine-3'-phosphate
  modified_base 12: mod_base = OTHER; note = 2'-O-methyluridine-3'-phosphate
  modified_base 13: mod_base = OTHER; note = 2'-O-methylguanosine-3'-phosphate
  modified_base 14: mod_base = OTHER; note = 2'-deoxy-2'-fluoroguanosine-3'-phosphate
  modified_base 15: mod_base = OTHER; note = 2'-O-methylguanosine-3'-phosphate
  modified_base 16: mod_base = OTHER; note = 2'-deoxy-2'-fluorocytidine-3'-phosphate
  modified_base 17: mod_base = OTHER; note = 2'-O-methyladenosine-3'-phosphate
  modified_base 18: mod_base = OTHER; note = 2'-O-methylcytidine-3'-phosphate
  modified_base 19: mod_base = OTHER; note = 2'-O-methyluridine-3'-phosphate
  modified_base 20: mod_base = OTHER; note = 2'-O-methylguanosine-3'-phosphate
  modified_base 21: mod_base = OTHER; note = 2'-O-methylcytidine-3'-phosphorothioate
  modified_base 22: mod_base = OTHER; note = 2'-O-methylcytidine-3'-phosphorothioate
  modified_base 23: mod_base = OTHER; note = 2'-O-methyladenosine
atcctcctcagtgggcactgcca

SEQ ID NO: 459 - RNA, 23 nt, synthetic construct
  source 1..23: mol_type = other RNA
  modified_base 1: mod_base = OTHER; note = 2'-O-methyladenosine-3'-phosphorothioate
  modified_base 2: mod_base = OTHER; note = 2'-deoxy-2'-fluoroadenosine-3'-phosphorothioate
  modified_base 3: mod_base = OTHER; note = 2'-O-methylguanosine-3'-phosphate
  modified_base 4: mod_base = OTHER; note = 2'-O-methyladenosine-3'-phosphate
  modified_base 5: mod_base = OTHER; note = 2'-O-methylguanosine-3'-phosphate
  modified_base 6: mod_base = OTHER; note = 2'-deoxy-2'-fluorouridine-3'-phosphate
  modified_base 7: mod_base = OTHER; note = 2'-O-methylcytidine-3'-phosphate
  modified_base 8: mod_base = OTHER; note = 2'-deoxy-2'-fluorocytidine-3'-phosphate
  modified_base 9: mod_base = OTHER; note = 2'-deoxy-2'-fluoroguanosine-3'-phosphate
  modified_base 10: mod_base = OTHER; note = 2'-O-methylguanosine-3'-phosphate
  modified_base 11: mod_base = OTHER; note = 2'-O-methylcytidine-3'-phosphate
  modified_base 12: mod_base = OTHER; note = 2'-O-methyluridine-3'-phosphate
  modified_base 13: mod_base = OTHER; note = 2'-O-methylcytidine-3'-phosphate
  modified_base 14: mod_base = OTHER; note = 2'-deoxy-2'-fluorocytidine-3'-phosphate
  modified_base 15: mod_base = OTHER; note = 2'-O-methyluridine-3'-phosphate
  modified_base 16: mod_base = OTHER; note = 2'-deoxy-2'-fluorocytidine-3'-phosphate
  modified_base 17: mod_base = OTHER; note = 2'-O-methylcytidine-3'-phosphate
  modified_base 18: mod_base = OTHER; note = 2'-O-methyluridine-3'-phosphate
  modified_base 19: mod_base = OTHER; note = 2'-O-methylcytidine-3'-phosphate
  modified_base 20: mod_base = OTHER; note = 2'-O-methyladenosine-3'-phosphate
  modified_base 21: mod_base = OTHER; note = 2'-O-methylguanosine-3'-phosphorothioate
  modified_base 22: mod_base = OTHER; note = 2'-O-methyluridine-3'-phosphorothioate
  modified_base 23: mod_base = OTHER; note = 2'-O-methylguanosine
aagagtccggctcctcctcagtg

SEQ ID NO: 460 - RNA, 23 nt, synthetic construct
  source 1..23: mol_type = other RNA
  modified_base 1: mod_base = OTHER; note = 2'-O-methyladenosine-3'-phosphorothioate
  modified_base 2: mod_base = OTHER; note = 2'-deoxy-2'-fluorouridine-3'-phosphorothioate
  modified_base 3: mod_base = OTHER; note = 2'-O-methyluridine-3'-phosphate
  modified_base 4: mod_base = OTHER; note = 2'-O-methylguanosine-3'-phosphate
  modified_base 5: mod_base = OTHER; note = 2'-O-methylguanosine-3'-phosphate
  modified_base 6: mod_base = OTHER; note = 2'-deoxy-2'-fluorocytidine-3'-phosphate
  modified_base 7: mod_base = OTHER; note = 2'-O-methyladenosine-3'-phosphate
  modified_base 8: mod_base = OTHER; note = 2'-deoxy-2'-fluoroguanosine-3'-phosphate
  modified_base 9: mod_base = OTHER; note = 2'-deoxy-2'-fluorocytidine-3'-phosphate
  modified_base 10: mod_base = OTHER; note = 2'-O-methyladenosine-3'-phosphate
  modified_base 11: mod_base = OTHER; note = 2'-O-methylguanosine-3'-phosphate
  modified_base 12: mod_base = OTHER; note = 2'-O-methyladenosine-3'-phosphate
  modified_base 13: mod_base = OTHER; note = 2'-O-methylguanosine-3'-phosphate
  modified_base 14: mod_base = OTHER; note = 2'-deoxy-2'-fluorouridine-3'-phosphate
  modified_base 15: mod_base = OTHER; note = 2'-O-methylcytidine-3'-phosphate
  modified_base 16: mod_base = OTHER; note = 2'-deoxy-2'-fluorocytidine-3'-phosphate
  modified_base 17: mod_base = OTHER; note = 2'-O-methylguanosine-3'-phosphate
  modified_base 18: mod_base = OTHER; note = 2'-O-methylguanosine-3'-phosphate
  modified_base 19: mod_base = OTHER; note = 2'-O-methylcytidine-3'-phosphate
  modified_base 20: mod_base = OTHER; note = 2'-O-methyluridine-3'-phosphate
  modified_base 21: mod_base = OTHER; note = 2'-O-methylcytidine-3'-phosphorothioate
  modified_base 22: mod_base = OTHER; note = 2'-O-methylcytidine-3'-phosphorothioate
  modified_base 23: mod_base = OTHER; note = 2'-O-methyluridine
attggcagcagagtccggctcct

SEQ ID NO: 461 - RNA, 23 nt, synthetic construct
  source 1..23: mol_type = other RNA
  modified_base 1: mod_base = OTHER; note = 2'-O-methyladenosine-3'-phosphorothioate
  modified_base 2: mod_base = OTHER; note = 2'-deoxy-2'-fluoroadenosine-3'-phosphorothioate
  modified_base 3: mod_base = OTHER; note = 2'-O-methylcytidine-3'-phosphate
  modified_base 4: mod_base = OTHER; note = 2'-O-methylcytidine-3'-phosphate
  modified_base 5: mod_base = OTHER; note = 2'-O-methyladenosine-3'-phosphate
  modified_base 6: mod_base = OTHER; note = 2'-deoxy-2'-fluorocytidine-3'-phosphate
  modified_base 7: mod_base = OTHER; note = 2'-O-methyluridine-3'-phosphate
  modified_base 8: mod_base = OTHER; note = 2'-deoxy-2'-fluorocytidine-3'-phosphate
  modified_base 9: mod_base = OTHER; note = 2'-deoxy-2'-fluorouridine-3'-phosphate
  modified_base 10: mod_base = OTHER; note = 2'-O-methyluridine-3'-phosphate
  modified_base 11: mod_base = OTHER; note = 2'-O-methylguanosine-3'-phosphate
  modified_base 12: mod_base = OTHER; note = 2'-O-methylguanosine-3'-phosphate
  modified_base 13: mod_base = OTHER; note = 2'-O-methylcytidine-3'-phosphate
  modified_base 14: mod_base = OTHER; note = 2'-deoxy-2'-fluoroadenosine-3'-phosphate
  modified_base 15: mod_base = OTHER; note = 2'-O-methylguanosine-3'-phosphate
  modified_base 16: mod_base = OTHER; note = 2'-deoxy-2'-fluorocytidine-3'-phosphate
  modified_base 17: mod_base = OTHER; note = 2'-O-methyladenosine-3'-phosphate
  modified_base 18: mod_base = OTHER; note = 2'-O-methylguanosine-3'-phosphate
  modified_base 19: mod_base = OTHER; note = 2'-O-methyladenosine-3'-phosphate
  modified_base 20: mod_base = OTHER; note = 2'-O-methylguanosine-3'-phosphate
  modified_base 21: mod_base = OTHER; note = 2'-O-methyluridine-3'-phosphorothioate
  modified_base 22: mod_base = OTHER; note = 2'-O-methylcytidine-3'-phosphorothioate
  modified_base 23: mod_base = OTHER; note = 2'-O-methylcytidine
aaccactcttggcagcagagtcc

SEQ ID NO: 462 - RNA, 23 nt, synthetic construct
  source 1..23: mol_type = other RNA
  modified_base 1: mod_base = OTHER; note = 2'-O-methyladenosine-3'-phosphorothioate
  modified_base 2: mod_base = OTHER; note = 2'-deoxy-2'-fluoroguanosine-3'-phosphorothioate
  modified_base 3: mod_base = OTHER; note = 2'-O-methylcytidine-3'-phosphate
  modified_base 4: mod_base = OTHER; note = 2'-O-methylcytidine-3'-phosphate
  modified_base 5: mod_base = OTHER; note = 2'-O-methyluridine-3'-phosphate
  modified_base 6: mod_base = OTHER; note = 2'-deoxy-2'-fluorocytidine-3'-phosphate
  modified_base 7: mod_base = OTHER; note = 2'-O-methyladenosine-3'-phosphate
  modified_base 8: mod_base = OTHER; note = 2'-deoxy-2'-fluorocytidine-3'-phosphate
  modified_base 9: mod_base = OTHER; note = 2'-deoxy-2'-fluorocytidine-3'-phosphate
  modified_base 10: mod_base = OTHER; note = 2'-O-methyladenosine-3'-phosphate
  modified_base 11: mod_base = OTHER; note = 2'-O-methylcytidine-3'-phosphate
  modified_base 12: mod_base = OTHER; note = 2'-O-methyluridine-3'-phosphate
  modified_base 13: mod_base = OTHER; note = 2'-O-methylcytidine-3'-phosphate
  modified_base 14: mod_base = OTHER; note = 2'-deoxy-2'-fluorouridine-3'-phosphate
  modified_base 15: mod_base = OTHER; note = 2'-O-methyluridine-3'-phosphate
  modified_base 16: mod_base = OTHER; note = 2'-deoxy-2'-fluoroguanosine-3'-phosphate
  modified_base 17: mod_base = OTHER; note = 2'-O-methylguanosine-3'-phosphate
  modified_base 18: mod_base = OTHER; note = 2'-O-methylcytidine-3'-phosphate
  modified_base 19: mod_base = OTHER; note = 2'-O-methyladenosine-3'-phosphate
  modified_base 20: mod_base = OTHER; note = 2'-O-methylguanosine-3'-phosphate
  modified_base 21: mod_base = OTHER; note = 2'-O-methylcytidine-3'-phosphorothioate
  modified_base 22: mod_base = OTHER; note = 2'-O-methyladenosine-3'-phosphorothioate
  modified_base 23: mod_base = OTHER; note = 2'-O-methylguanosine
agcctcaccactcttggcagcag

SEQ ID NO: 463 - RNA, 23 nt, synthetic construct
  source 1..23: mol_type = other RNA
  modified_base 1: mod_base = OTHER; note = 2'-O-methyladenosine-3'-phosphorothioate
  modified_base 2: mod_base = OTHER; note = 2'-deoxy-2'-fluorouridine-3'-phosphorothioate
  modified_base 3: mod_base = OTHER; note = 2'-O-methylcytidine-3'-phosphate
  modified_base 4: mod_base = OTHER; note = 2'-O-methyladenosine-3'-phosphate
  modified_base 5: mod_base = OTHER; note = 2'-O-methyluridine-3'-phosphate
  modified_base 6: mod_base = OTHER; note = 2'-deoxy-2'-fluoroadenosine-3'-phosphate
  modified_base 7: mod_base = OTHER; note = 2'-O-methylcytidine-3'-phosphate
  modified_base 8: mod_base = OTHER; note = 2'-deoxy-2'-fluorocytidine-3'-phosphate
  modified_base 9: mod_base = OTHER; note = 2'-deoxy-2'-fluoroadenosine-3'-phosphate
  modified_base 10: mod_base = OTHER; note = 2'-O-methylcytidine-3'-phosphate
  modified_base 11: mod_base = OTHER; note = 2'-O-methylguanosine-3'-phosphate
  modified_base 12: mod_base = OTHER; note = 2'-O-methylcytidine-3'-phosphate
  modified_base 13: mod_base = OTHER; note = 2'-O-methylcytidine-3'-phosphate
  modified_base 14: mod_base = OTHER; note = 2'-deoxy-2'-fluorouridine-3'-phosphate
  modified_base 15: mod_base = OTHER; note = 2'-O-methylcytidine-3'-phosphate
  modified_base 16: mod_base = OTHER; note = 2'-deoxy-2'-fluoroadenosine-3'-phosphate
  modified_base 17: mod_base = OTHER; note = 2'-O-methylcytidine-3'-phosphate
  modified_base 18: mod_base = OTHER; note = 2'-O-methylcytidine-3'-phosphate
  modified_base 19: mod_base = OTHER; note = 2'-O-methyladenosine-3'-phosphate
  modified_base 20: mod_base = OTHER; note = 2'-O-methylcytidine-3'-phosphate
  modified_base 21: mod_base = OTHER; note = 2'-O-methyluridine-3'-phosphorothioate
  modified_base 22: mod_base = OTHER; note = 2'-O-methylcytidine-3'-phosphorothioate
  modified_base 23: mod_base = OTHER; note = 2'-O-methyluridine
atcataccacgcctcaccactct

SEQ ID NO: 464 - RNA, 23 nt, synthetic construct
  source 1..23: mol_type = other RNA
  modified_base 1: mod_base = OTHER; note = 2'-O-methyladenosine-3'-phosphorothioate
  modified_base 2: mod_base = OTHER; note = 2'-deoxy-2'-fluorocytidine-3'-phosphorothioate
  modified_base 3: mod_base = OTHER; note = 2'-O-methylguanosine-3'-phosphate
  modified_base 4: mod_base = OTHER; note = 2'-O-methylcytidine-3'-phosphate
  modified_base 5: mod_base = OTHER; note = 2'-O-methyladenosine-3'-phosphate
  modified_base 6: mod_base = OTHER; note = 2'-deoxy-2'-fluoroguanosine-3'-phosphate
  modified_base 7: mod_base = OTHER; note = 2'-O-methylcytidine-3'-phosphate
  modified_base 8: mod_base = OTHER; note = 2'-deoxy-2'-fluoroadenosine-3'-phosphate
  modified_base 9: mod_base = OTHER; note = 2'-deoxy-2'-fluorouridine-3'-phosphate
  modified_base 10: mod_base = OTHER; note = 2'-O-methyladenosine-3'-phosphate
  modified_base 11: mod_base = OTHER; note = 2'-O-methylguanosine-3'-phosphate
  modified_base 12: mod_base = OTHER; note = 2'-O-methylcytidine-3'-phosphate
  modified_base 13: mod_base = OTHER; note = 2'-O-methyladenosine-3'-phosphate
  modified_base 14: mod_base = OTHER; note = 2'-deoxy-2'-fluorocytidine-3'-phosphate
  modified_base 15: mod_base = OTHER; note = 2'-O-methylcytidine-3'-phosphate
  modified_base 16: mod_base = OTHER; note = 2'-deoxy-2'-fluoroguanosine-3'-phosphate
  modified_base 17: mod_base = OTHER; note = 2'-O-methyladenosine-3'-phosphate
  modified_base 18: mod_base = OTHER; note = 2'-O-methylguanosine-3'-phosphate
  modified_base 19: mod_base = OTHER; note = 2'-O-methylguanosine-3'-phosphate
  modified_base 20: mod_base = OTHER; note = 2'-O-methyluridine-3'-phosphate
  modified_base 21: mod_base = OTHER; note = 2'-O-methyluridine-3'-phosphorothioate
  modified_base 22: mod_base = OTHER; note = 2'-O-methylcytidine-3'-phosphorothioate
  modified_base 23: mod_base = OTHER; note = 2'-O-methylcytidine
acgcagcatagcaccgaggttcc

SEQ ID NO: 465 - RNA, 23 nt, synthetic construct
  source 1..23: mol_type = other RNA
  modified_base 1: mod_base = OTHER; note = 2'-O-methyladenosine-3'-phosphorothioate
  modified_base 2: mod_base = OTHER; note = 2'-deoxy-2'-fluorocytidine-3'-phosphorothioate
  modified_base 3: mod_base = OTHER; note = 2'-O-methyladenosine-3'-phosphate
  modified_base 4: mod_base = OTHER; note = 2'-O-methylcytidine-3'-phosphate
  modified_base 5: mod_base = OTHER; note = 2'-O-methyladenosine-3'-phosphate
  modified_base 6: mod_base = OTHER; note = 2'-deoxy-2'-fluorocytidine-3'-phosphate
  modified_base 7: mod_base = OTHER; note = 2'-O-methylcytidine-3'-phosphate
  modified_base 8: mod_base = OTHER; note = 2'-deoxy-2'-fluoroguanosine-3'-phosphate
  modified_base 9: mod_base = OTHER; note = 2'-deoxy-2'-fluorocytidine-3'-phosphate
  modified_base 10: mod_base = OTHER; note = 2'-O-methyladenosine-3'-phosphate
  modified_base 11: mod_base = OTHER; note = 2'-O-methylguanosine-3'-phosphate
  modified_base 12: mod_base = OTHER; note = 2'-O-methylcytidine-3'-phosphate
  modified_base 13: mod_base = OTHER; note = 2'-O-methyladenosine-3'-phosphate
  modified_base 14: mod_base = OTHER; note = 2'-deoxy-2'-fluorouridine-3'-phosphate
  modified_base 15: mod_base = OTHER; note = 2'-O-methyladenosine-3'-phosphate
  modified_base 16: mod_base = OTHER; note = 2'-deoxy-2'-fluoroguanosine-3'-phosphate
  modified_base 17: mod_base = OTHER; note = 2'-O-methylcytidine-3'-phosphate
  modified_base 18: mod_base = OTHER; note = 2'-O-methyladenosine-3'-phosphate
  modified_base 19: mod_base = OTHER; note = 2'-O-methylcytidine-3'-phosphate
  modified_base 20: mod_base = OTHER; note = 2'-O-methylcytidine-3'-phosphate
  modified_base 21: mod_base = OTHER; note = 2'-O-methylguanosine-3'-phosphorothioate
  modified_base 22: mod_base = OTHER; note = 2'-O-methyladenosine-3'-phosphorothioate
  modified_base 23: mod_base = OTHER; note = 2'-O-methylguanosine
acacaccgcagcatagcaccgag

SEQ ID NO: 466 - RNA, 23 nt, synthetic construct
  source 1..23: mol_type = other RNA
  modified_base 1: mod_base = OTHER; note = 2'-O-methyladenosine-3'-phosphorothioate
  modified_base 2: mod_base = OTHER; note = 2'-deoxy-2'-fluoroguanosine-3'-phosphorothioate
  modified_base 3: mod_base = OTHER; note = 2'-O-methyluridine-3'-phosphate
  modified_base 4: mod_base = OTHER; note = 2'-O-methylcytidine-3'-phosphate
  modified_base 5: mod_base = OTHER; note = 2'-O-methylcytidine-3'-phosphate
  modified_base 6: mod_base = OTHER; note = 2'-deoxy-2'-fluoroadenosine-3'-phosphate
  modified_base 7: mod_base = OTHER; note = 2'-O-methylcytidine-3'-phosphate
  modified_base 8: mod_base = OTHER; note = 2'-deoxy-2'-fluoroadenosine-3'-phosphate
  modified_base 9: mod_base = OTHER; note = 2'-deoxy-2'-fluorocytidine-3'-phosphate
  modified_base 10: mod_base = OTHER; note = 2'-O-methyladenosine-3'-phosphate
  modified_base 11: mod_base = OTHER; note = 2'-O-methylcytidine-3'-phosphate
  modified_base 12: mod_base = OTHER; note = 2'-O-methylcytidine-3'-phosphate
  modified_base 13: mod_base = OTHER; note = 2'-O-methylguanosine-3'-phosphate
  modified_base 14: mod_base = OTHER; note = 2'-deoxy-2'-fluorocytidine-3'-phosphate
  modified_base 15: mod_base = OTHER; note = 2'-O-methyladenosine-3'-phosphate
  modified_base 16: mod_base = OTHER; note = 2'-deoxy-2'-fluoroguanosine-3'-phosphate
  modified_base 17: mod_base = OTHER; note = 2'-O-methylcytidine-3'-phosphate
  modified_base 18: mod_base = OTHER; note = 2'-O-methyladenosine-3'-phosphate
  modified_base 19: mod_base = OTHER; note = 2'-O-methyluridine-3'-phosphate
  modified_base 20: mod_base = OTHER; note = 2'-O-methyladenosine-3'-phosphate
  modified_base 21: mod_base = OTHER; note = 2'-O-methylguanosine-3'-phosphorothioate
  modified_base 22: mod_base = OTHER; note = 2'-O-methylcytidine-3'-phosphorothioate
  modified_base 23: mod_base = OTHER; note = 2'-O-methyladenosine
agtccacacaccgcagcatagca

SEQ ID NO: 467 - RNA, 23 nt, synthetic construct
  source 1..23: mol_type = other RNA
  modified_base 1: mod_base = OTHER; note = 2'-O-methyladenosine-3'-phosphorothioate
  modified_base 2: mod_base = OTHER; note = 2'-deoxy-2'-fluorocytidine-3'-phosphorothioate
  modified_base 3: mod_base = OTHER; note = 2'-O-methylguanosine-3'-phosphate
  modified_base 4: mod_base = OTHER; note = 2'-O-methyluridine-3'-phosphate
  modified_base 5: mod_base = OTHER; note = 2'-O-methylguanosine-3'-phosphate
  modified_base 6: mod_base = OTHER; note = 2'-deoxy-2'-fluoroadenosine-3'-phosphate
  modified_base 7: mod_base = OTHER; note = 2'-O-methylcytidine-3'-phosphate
  modified_base 8: mod_base = OTHER; note = 2'-deoxy-2'-fluoroadenosine-3'-phosphate
  modified_base 9: mod_base = OTHER; note = 2'-deoxy-2'-fluoroguanosine-3'-phosphate
  modified_base 10: mod_base = OTHER; note = 2'-O-methylguanosine-3'-phosphate
  modified_base 11: mod_base = OTHER; note = 2'-O-methyluridine-3'-phosphate
  modified_base 12: mod_base = OTHER; note = 2'-O-methylcytidine-3'-phosphate
  modified_base 13: mod_base = OTHER; note = 2'-O-methylcytidine-3'-phosphate
  modified_base 14: mod_base = OTHER; note = 2'-deoxy-2'-fluoroadenosine-3'-phosphate
  modified_base 15: mod_base = OTHER; note = 2'-O-methylcytidine-3'-phosphate
  modified_base 16: mod_base = OTHER; note = 2'-deoxy-2'-fluoroadenosine-3'-phosphate
  modified_base 17: mod_base = OTHER; note = 2'-O-methylcytidine-3'-phosphate
  modified_base 18: mod_base = OTHER; note = 2'-O-methyladenosine-3'-phosphate
  modified_base 19: mod_base = OTHER; note = 2'-O-methylcytidine-3'-phosphate
  modified_base 20: mod_base = OTHER; note = 2'-O-methylcytidine-3'-phosphate
  modified_base 21: mod_base = OTHER; note = 2'-O-methylguanosine-3'-phosphorothioate
  modified_base 22: mod_base = OTHER; note = 2'-O-methylcytidine-3'-phosphorothioate
  modified_base 23: mod_base = OTHER; note = 2'-O-methyladenosine
acgtgacaggtccacacaccgca

SEQ ID NO: 468 - RNA, 23 nt, synthetic construct
  source 1..23: mol_type = other RNA
  modified_base 1: mod_base = OTHER; note = 2'-O-methyladenosine-3'-phosphorothioate
  modified_base 2: mod_base = OTHER; note = 2'-deoxy-2'-fluorouridine-3'-phosphorothioate
  modified_base 3: mod_base = OTHER; note = 2'-O-methylcytidine-3'-phosphate
  modified_base 4: mod_base = OTHER; note = 2'-O-methyladenosine-3'-phosphate
  modified_base 5: mod_base = OTHER; note = 2'-O-methylguanosine-3'-phosphate
  modified_base 6: mod_base = OTHER; note = 2'-deoxy-2'-fluorocytidine-3'-phosphate
  modified_base 7: mod_base = OTHER; note = 2'-O-methyluridine-3'-phosphate
  modified_base 8: mod_base = OTHER; note = 2'-deoxy-2'-fluoroguanosine-3'-phosphate
  modified_base 9: mod_base = OTHER; note = 2'-deoxy-2'-fluorocytidine-3'-phosphate
  modified_base 10: mod_base = OTHER; note = 2'-O-methyladenosine-3'-phosphate
  modified_base 11: mod_base = OTHER; note = 2'-O-methyluridine-3'-phosphate
  modified_base 12: mod_base = OTHER; note = 2'-O-methylguanosine-3'-phosphate
  modified_base 13: mod_base = OTHER; note = 2'-O-methyladenosine-3'-phosphate
  modified_base 14: mod_base = OTHER; note = 2'-deoxy-2'-fluoroguanosine-3'-phosphate
  modified_base 15: mod_base = OTHER; note = 2'-O-methylguanosine-3'-phosphate
  modified_base 16: mod_base = OTHER; note = 2'-deoxy-2'-fluorocytidine-3'-phosphate
  modified_base 17: mod_base = OTHER; note = 2'-O-methyluridine-3'-phosphate
  modified_base 18: mod_base = OTHER; note = 2'-O-methylguanosine-3'-phosphate
  modified_base 19: mod_base = OTHER; note = 2'-O-methylguanosine-3'-phosphate
  modified_base 20: mod_base = OTHER; note = 2'-O-methylcytidine-3'-phosphate
  modified_base 21: mod_base = OTHER; note = 2'-O-methylcytidine-3'-phosphorothioate
  modified_base 22: mod_base = OTHER; note = 2'-O-methyluridine-3'-phosphorothioate
  modified_base 23: mod_base = OTHER; note = 2'-O-methylcytidine
atcagctgcatgaggctggcctc

SEQ ID NO: 469 - RNA, 23 nt, synthetic construct
  source 1..23: mol_type = other RNA
  modified_base 1: mod_base = OTHER; note = 2'-O-methyladenosine-3'-phosphorothioate
  modified_base 2: mod_base = OTHER; note = 2'-deoxy-2'-fluorocytidine-3'-phosphorothioate
  modified_base 3: mod_base = OTHER; note = 2'-O-methyladenosine-3'-phosphate
  modified_base 4: mod_base = OTHER; note = 2'-O-methylcytidine-3'-phosphate
  modified_base 5: mod_base = OTHER; note = 2'-O-methylcytidine-3'-phosphate
  modified_base 6: mod_base = OTHER; note = 2'-deoxy-2'-fluorouridine-3'-phosphate
  modified_base 7: mod_base = OTHER; note = 2'-O-methyluridine-3'-phosphate
  modified_base 8: mod_base = OTHER; note = 2'-deoxy-2'-fluorocytidine-3'-phosphate
  modified_base 9: mod_base = OTHER; note = 2'-deoxy-2'-fluoroadenosine-3'-phosphate
  modified_base 10: mod_base = OTHER; note = 2'-O-methylguanosine-3'-phosphate
  modified_base 11: mod_base = OTHER; note = 2'-O-methylcytidine-3'-phosphate
  modified_base 12: mod_base = OTHER; note = 2'-O-methyluridine-3'-phosphate
  modified_base 13: mod_base = OTHER; note = 2'-O-methylguanosine-3'-phosphate
  modified_base 14: mod_base = OTHER; note = 2'-deoxy-2'-fluorocytidine-3'-phosphate
  modified_base 15: mod_base = OTHER; note = 2'-O-methyladenosine-3'-phosphate
  modified_base 16: mod_base = OTHER; note = 2'-deoxy-2'-fluorouridine-3'-phosphate
  modified_base 17: mod_base = OTHER; note = 2'-O-methylguanosine-3'-phosphate
  modified_base 18: mod_base = OTHER; note = 2'-O-methyladenosine-3'-phosphate
  modified_base 19: mod_base = OTHER; note = 2'-O-methylguanosine-3'-phosphate
  modified_base 20: mod_base = OTHER; note = 2'-O-methylguanosine-3'-phosphate
  modified_base 21: mod_base = OTHER; note = 2'-O-methylcytidine-3'-phosphorothioate
  modified_base 22: mod_base = OTHER; note = 2'-O-methyluridine-3'-phosphorothioate
  modified_base 23: mod_base = OTHER; note = 2'-O-methylguanosine
acaccttcagctgcatgaggctg

SEQ ID NO: 470 - RNA, 23 nt, synthetic construct
  source 1..23: mol_type = other RNA
  modified_base 1: mod_base = OTHER; note = 2'-O-methyladenosine-3'-phosphorothioate
  modified_base 2: mod_base = OTHER; note = 2'-deoxy-2'-fluoroguanosine-3'-phosphorothioate
  modified_base 3: mod_base = OTHER; note = 2'-O-methylcytidine-3'-phosphate
  modified_base 4: mod_base = OTHER; note = 2'-O-methylcytidine-3'-phosphate
  modified_base 5: mod_base = OTHER; note = 2'-O-methylguanosine-3'-phosphate
  modified_base 6: mod_base = OTHER; note = 2'-deoxy-2'-fluorouridine-3'-phosphate
  modified_base 7: mod_base = OTHER; note = 2'-O-methylcytidine-3'-phosphate
  modified_base 8: mod_base = OTHER; note = 2'-deoxy-2'-fluoroadenosine-3'-phosphate
  modified_base 9: mod_base = OTHER; note = 2'-deoxy-2'-fluorocytidine-3'-phosphate
  modified_base 10: mod_base = OTHER; note = 2'-O-methylcytidine-3'-phosphate
  modified_base 11: mod_base = OTHER; note = 2'-O-methyluridine-3'-phosphate
  modified_base 12: mod_base = OTHER; note = 2'-O-methyluridine-3'-phosphate
  modified_base 13: mod_base = OTHER; note = 2'-O-methylcytidine-3'-phosphate
  modified_base 14: mod_base = OTHER; note = 2'-deoxy-2'-fluoroadenosine-3'-phosphate
  modified_base 15: mod_base = OTHER; note = 2'-O-methylguanosine-3'-phosphate
  modified_base 16: mod_base = OTHER; note = 2'-deoxy-2'-fluorocytidine-3'-phosphate
  modified_base 17: mod_base = OTHER; note = 2'-O-methyluridine-3'-phosphate
  modified_base 18: mod_base = OTHER; note = 2'-O-methylguanosine-3'-phosphate
  modified_base 19: mod_base = OTHER; note = 2'-O-methylcytidine-3'-phosphate
  modified_base 20: mod_base = OTHER; note = 2'-O-methyladenosine-3'-phosphate
  modified_base 21: mod_base = OTHER; note = 2'-O-methyluridine-3'-phosphorothioate
  modified_base 22: mod_base = OTHER; note = 2'-O-methylguanosine-3'-phosphorothioate
  modified_base 23: mod_base = OTHER; note = 2'-O-methyladenosine
agccgtcaccttcagctgcatga

SEQ ID NO: 471 - RNA, 23 nt, synthetic construct
  source 1..23: mol_type = other RNA
  modified_base 1: mod_base = OTHER; note = 2'-O-methyladenosine-3'-phosphorothioate
  modified_base 2: mod_base = OTHER; note = 2'-deoxy-2'-fluorouridine-3'-phosphorothioate
  modified_base 3: mod_base = OTHER; note = 2'-O-methylcytidine-3'-phosphate
  modified_base 4: mod_base = OTHER; note = 2'-O-methyladenosine-3'-phosphate
  modified_base 5: mod_base = OTHER; note = 2'-O-methylguanosine-3'-phosphate
  modified_base 6: mod_base = OTHER; note = 2'-deoxy-2'-fluorocytidine-3'-phosphate
  modified_base 7: mod_base = OTHER; note = 2'-O-methylguanosine-3'-phosphate
  modified_base 8: mod_base = OTHER; note = 2'-deoxy-2'-fluorocytidine-3'-phosphate
  modified_base 9: mod_base = OTHER; note = 2'-deoxy-2'-fluorocytidine-3'-phosphate
  modified_base 10: mod_base = OTHER; note = 2'-O-methylguanosine-3'-phosphate
  modified_base 11: mod_base = OTHER; note = 2'-O-methyluridine-3'-phosphate
  modified_base 12: mod_base = OTHER; note = 2'-O-methylcytidine-3'-phosphate
  modified_base 13: mod_base = OTHER; note = 2'-O-methyladenosine-3'-phosphate
  modified_base 14: mod_base = OTHER; note = 2'-deoxy-2'-fluorocytidine-3'-phosphate
  modified_base 15: mod_base = OTHER; note = 2'-O-methylcytidine-3'-phosphate
  modified_base 16: mod_base = OTHER; note = 2'-deoxy-2'-fluorouridine-3'-phosphate
  modified_base 17: mod_base = OTHER; note = 2'-O-methyluridine-3'-phosphate
  modified_base 18: mod_base = OTHER; note = 2'-O-methylcytidine-3'-phosphate
  modified_base 19: mod_base = OTHER; note = 2'-O-methyladenosine-3'-phosphate
  modified_base 20: mod_base = OTHER; note = 2'-O-methylguanosine-3'-phosphate
  modified_base 21: mod_base = OTHER; note = 2'-O-methylcytidine-3'-phosphorothioate
  modified_base 22: mod_base = OTHER; note = 2'-O-methyluridine-3'-phosphorothioate
  modified_base 23: mod_base = OTHER; note = 2'-O-methylguanosine
atcagcgccgtcaccttcagctg

SEQ ID NO: 472 - RNA, 23 nt, synthetic construct
  source 1..23: mol_type = other RNA
  modified_base 1: mod_base = OTHER; note = 2'-O-methyladenosine-3'-phosphorothioate
  modified_base 2: mod_base = OTHER; note = 2'-deoxy-2'-fluorouridine-3'-phosphorothioate
  modified_base 3: mod_base = OTHER; note = 2'-O-methyladenosine-3'-phosphate
  modified_base 4: mod_base = OTHER; note = 2'-O-methylcytidine-3'-phosphate
  modified_base 5: mod_base = OTHER; note = 2'-O-methyluridine-3'-phosphate
  modified_base 6: mod_base = OTHER; note = 2'-deoxy-2'-fluoroguanosine-3'-phosphate
  modified_base 7: mod_base = OTHER; note = 2'-O-methylguanosine-3'-phosphate
  modified_base 8: mod_base = OTHER; note = 2'-deoxy-2'-fluorouridine-3'-phosphate
  modified_base 9: mod_base = OTHER; note = 2'-deoxy-2'-fluorocytidine-3'-phosphate
  modified_base 10: mod_base = OTHER; note = 2'-O-methyladenosine-3'-phosphate
  modified_base 11: mod_base = OTHER; note = 2'-O-methylguanosine-3'-phosphate
  modified_base 12: mod_base = OTHER; note = 2'-O-methylcytidine-3'-phosphate
  modified_base 13: mod_base = OTHER; note = 2'-O-methylguanosine-3'-phosphate
  modified_base 14: mod_base = OTHER; note = 2'-deoxy-2'-fluorocytidine-3'-phosphate
  modified_base 15: mod_base = OTHER; note = 2'-O-methylcytidine-3'-phosphate
  modified_base 16: mod_base = OTHER; note = 2'-deoxy-2'-fluoroguanosine-3'-phosphate
  modified_base 17: mod_base = OTHER; note = 2'-O-methyluridine-3'-phosphate
  modified_base 18: mod_base = OTHER; note = 2'-O-methylcytidine-3'-phosphate
  modified_base 19: mod_base = OTHER; note = 2'-O-methyladenosine-3'-phosphate
  modified_base 20: mod_base = OTHER; note = 2'-O-methylcytidine-3'-phosphate
  modified_base 21: mod_base = OTHER; note = 2'-O-methylcytidine-3'-phosphorothioate
  modified_base 22: mod_base = OTHER; note = 2'-O-methyluridine-3'-phosphorothioate
  modified_base 23: mod_base = OTHER; note = 2'-O-methyluridine
atactggtcagcgccgtcacctt

SEQ ID NO: 473 - RNA, 23 nt, synthetic construct
  source 1..23: mol_type = other RNA
  modified_base 1: mod_base = OTHER; note = 2'-O-methyladenosine-3'-phosphorothioate
  modified_base 2: mod_base = OTHER; note = 2'-deoxy-2'-fluoroadenosine-3'-phosphorothioate
  modified_base 3: mod_base = OTHER; note = 2'-O-methylguanosine-3'-phosphate
  modified_base 4: mod_base = OTHER; note = 2'-O-methyladenosine-3'-phosphate
  modified_base 5: mod_base = OTHER; note = 2'-O-methylguanosine-3'-phosphate
  modified_base 6: mod_base = OTHER; note = 2'-deoxy-2'-fluorocytidine-3'-phosphate
  modified_base 7: mod_base = OTHER; note = 2'-O-methylcytidine-3'-phosphate
  modified_base 8: mod_base = OTHER; note = 2'-deoxy-2'-fluoroguanosine-3'-phosphate
  modified_base 9: mod_base = OTHER; note = 2'-deoxy-2'-fluoroadenosine-3'-phosphate
  modified_base 10: mod_base = OTHER; note = 2'-O-methylguanosine-3'-phosphate
  modified_base 11: mod_base = OTHER; note = 2'-O-methyluridine-3'-phosphate
  modified_base 12: mod_base = OTHER; note = 2'-O-methyladenosine-3'-phosphate
  modified_base 13: mod_base = OTHER; note = 2'-O-methylcytidine-3'-phosphate
  modified_base 14: mod_base = OTHER; note = 2'-deoxy-2'-fluorouridine-3'-phosphate
  modified_base 15: mod_base = OTHER; note = 2'-O-methylguanosine-3'-phosphate
  modified_base 16: mod_base = OTHER; note = 2'-deoxy-2'-fluoroguanosine-3'-phosphate
  modified_base 17: mod_base = OTHER; note = 2'-O-methyluridine-3'-phosphate
  modified_base 18: mod_base = OTHER; note = 2'-O-methylcytidine-3'-phosphate
  modified_base 19: mod_base = OTHER; note = 2'-O-methyladenosine-3'-phosphate
  modified_base 20: mod_base = OTHER; note = 2'-O-methylguanosine-3'-phosphate
  modified_base 21: mod_base = OTHER; note = 2'-O-methylcytidine-3'-phosphorothioate
  modified_base 22: mod_base = OTHER; note = 2'-O-methylguanosine-3'-phosphorothioate
  modified_base 23: mod_base = OTHER; note = 2'-O-methylcytidine
aagagccgagtactggtcagcgc

SEQ ID NO: 474 - RNA, 23 nt, synthetic construct
  source 1..23: mol_type = other RNA
  modified_base 1: mod_base = OTHER; note = 2'-O-methyladenosine-3'-phosphorothioate
  modified_base 2: mod_base = OTHER; note = 2'-deoxy-2'-fluorouridine-3'-phosphorothioate
  modified_base 3: mod_base = OTHER; note = 2'-O-methylcytidine-3'-phosphate
  modified_base 4: mod_base = OTHER; note = 2'-O-methylcytidine-3'-phosphate
  modified_base 5: mod_base = OTHER; note = 2'-O-methyluridine-3'-phosphate
  modified_base 6: mod_base = OTHER; note = 2'-deoxy-2'-fluorouridine-3'-phosphate
  modified_base 7: mod_base = OTHER; note = 2'-O-methyladenosine-3'-phosphate
  modified_base 8: mod_base = OTHER; note = 2'-deoxy-2'-fluorocytidine-3'-phosphate
  modified_base 9: mod_base = OTHER; note = 2'-deoxy-2'-fluoroadenosine-3'-phosphate
  modified_base 10: mod_base = OTHER; note = 2'-O-methylguanosine-3'-phosphate
  modified_base 11: mod_base = OTHER; note = 2'-O-methyladenosine-3'-phosphate
  modified_base 12: mod_base = OTHER; note = 2'-O-methylguanosine-3'-phosphate
  modified_base 13: mod_base = OTHER; note = 2'-O-methylcytidine-3'-phosphate
  modified_base 14: mod_base = OTHER; note = 2'-deoxy-2'-fluorocytidine-3'-phosphate
  modified_base 15: mod_base = OTHER; note = 2'-O-methylguanosine-3'-phosphate
  modified_base 16: mod_base = OTHER; note = 2'-deoxy-2'-fluoroadenosine-3'-phosphate
  modified_base 17: mod_base = OTHER; note = 2'-O-methylguanosine-3'-phosphate
  modified_base 18: mod_base = OTHER; note = 2'-O-methyluridine-3'-phosphate
  modified_base 19: mod_base = OTHER; note = 2'-O-methyladenosine-3'-phosphate
  modified_base 20: mod_base = OTHER; note = 2'-O-methylcytidine-3'-phosphate
  modified_base 21: mod_base = OTHER; note = 2'-O-methyluridine-3'-phosphorothioate
  modified_base 22: mod_base = OTHER; note = 2'-O-methylguanosine-3'-phosphorothioate
  modified_base 23: mod_base = OTHER; note = 2'-O-methylguanosine
atccttacagagccgagtactgg

SEQ ID NO: 475 - RNA, 23 nt, synthetic construct
  source 1..23: mol_type = other RNA
  modified_base 1: mod_base = OTHER; note = 2'-O-methyladenosine-3'-phosphorothioate
  modified_base 2: mod_base = OTHER; note = 2'-deoxy-2'-fluorocytidine-3'-phosphorothioate
  modified_base 3: mod_base = OTHER; note = 2'-O-methyluridine-3'-phosphate
  modified_base 4: mod_base = OTHER; note = 2'-O-methyladenosine-3'-phosphate
  modified_base 5: mod_base = OTHER; note = 2'-O-methylguanosine-3'-phosphate
  modified_base 6: mod_base = OTHER; note = 2'-deoxy-2'-fluorocytidine-3'-phosphate
  modified_base 7: mod_base = OTHER; note = 2'-O-methyluridine-3'-phosphate
  modified_base 8: mod_base = OTHER; note = 2'-deoxy-2'-fluorocytidine-3'-phosphate
  modified_base 9: mod_base = OTHER; note = 2'-deoxy-2'-fluorocytidine-3'-phosphate
  modified_base 10: mod_base = OTHER; note = 2'-O-methyluridine-3'-phosphate
  modified_base 11: mod_base = OTHER; note = 2'-O-methyluridine-3'-phosphate
  modified_base 12: mod_base = OTHER; note = 2'-O-methyladenosine-3'-phosphate
  modified_base 13: mod_base = OTHER; note = 2'-O-methylcytidine-3'-phosphate
  modified_base 14: mod_base = OTHER; note = 2'-deoxy-2'-fluoroadenosine-3'-phosphate
  modified_base 15: mod_base = OTHER; note = 2'-O-methylguanosine-3'-phosphate
  modified_base 16: mod_base = OTHER; note = 2'-deoxy-2'-fluoroadenosine-3'-phosphate
  modified_base 17: mod_base = OTHER; note = 2'-O-methylguanosine-3'-phosphate
  modified_base 18: mod_base = OTHER; note = 2'-O-methylcytidine-3'-phosphate
  modified_base 19: mod_base = OTHER; note = 2'-O-methylcytidine-3'-phosphate
  modified_base 20: mod_base = OTHER; note = 2'-O-methylguanosine-3'-phosphate
  modified_base 21: mod_base = OTHER; note = 2'-O-methyladenosine-3'-phosphorothioate
  modified_base 22: mod_base = OTHER; note = 2'-O-methylguanosine-3'-phosphorothioate
  modified_base 23: mod_base = OTHER; note = 2'-O-methyluridine
actagctccttacagagccgagt

SEQ ID NO: 476 - RNA, 23 nt, synthetic construct
  source 1..23: mol_type = other RNA
  modified_base 1: mod_base = OTHER; note = 2'-O-methyladenosine-3'-phosphorothioate
  modified_base 2: mod_base = OTHER; note = 2'-deoxy-2'-fluoroadenosine-3'-phosphorothioate
  modified_base 3: mod_base = OTHER; note = 2'-O-methylcytidine-3'-phosphate
  modified_base 4: mod_base = OTHER; note = 2'-O-methylguanosine-3'-phosphate
  modified_base 5: mod_base = OTHER; note = 2'-O-methyladenosine-3'-phosphate
  modified_base 6: mod_base = OTHER; note = 2'-deoxy-2'-fluoroguanosine-3'-phosphate
  modified_base 7: mod_base = OTHER; note = 2'-O-methylguanosine-3'-phosphate
  modified_base 8: mod_base = OTHER; note = 2'-deoxy-2'-fluorocytidine-3'-phosphate
  modified_base 9: mod_base = OTHER; note = 2'-deoxy-2'-fluorouridine-3'-phosphate
  modified_base 10: mod_base = OTHER; note = 2'-O-methyladenosine-3'-phosphate
  modified_base 11: mod_base = OTHER; note = 2'-O-methylguanosine-3'-phosphate
  modified_base 12: mod_base = OTHER; note = 2'-O-methylcytidine-3'-phosphate
  modified_base 13: mod_base = OTHER; note = 2'-O-methyluridine-3'-phosphate
  modified_base 14: mod_base = OTHER; note = 2'-deoxy-2'-fluorocytidine-3'-phosphate
  modified_base 15: mod_base = OTHER; note = 2'-O-methylcytidine-3'-phosphate
  modified_base 16: mod_base = OTHER; note = 2'-deoxy-2'-fluorouridine-3'-phosphate
  modified_base 17: mod_base = OTHER; note = 2'-O-methyluridine-3'-phosphate
  modified_base 18: mod_base = OTHER; note = 2'-O-methyladenosine-3'-phosphate
  modified_base 19: mod_base = OTHER; note = 2'-O-methylcytidine-3'-phosphate
  modified_base 20: mod_base = OTHER; note = 2'-O-methyladenosine-3'-phosphate
  modified_base 21: mod_base = OTHER; note = 2'-O-methylguanosine-3'-phosphorothioate
  modified_base 22: mod_base = OTHER; note = 2'-O-methyladenosine-3'-phosphorothioate
  modified_base 23: mod_base = OTHER; note = 2'-O-methylguanosine
aacgaggctagctccttacagag

SEQ ID NO: 477 - RNA, 23 nt, synthetic construct
  source 1..23: mol_type = other RNA
  modified_base 1: mod_base = OTHER; note = 2'-O-methyladenosine-3'-phosphorothioate
  modified_base 2: mod_base = OTHER; note = 2'-deoxy-2'-fluoroguanosine-3'-phosphorothioate
  modified_base 3: mod_base = OTHER; note = 2'-O-methyladenosine-3'-phosphate
  modified_base 4: mod_base = OTHER; note = 2'-O-methylcytidine-3'-phosphate
  modified_base 5: mod_base = OTHER; note = 2'-O-methylcytidine-3'-phosphate
  modified_base 6: mod_base = OTHER; note = 2'-deoxy-2'-fluorocytidine-3'-phosphate
  modified_base 7: mod_base = OTHER; note = 2'-O-methyladenosine-3'-phosphate
  modified_base 8: mod_base = OTHER; note = 2'-deoxy-2'-fluorocytidine-3'-phosphate
  modified_base 9: mod_base = OTHER; note = 2'-deoxy-2'-fluoroguanosine-3'-phosphate
  modified_base 10: mod_base = OTHER; note = 2'-O-methyladenosine-3'-phosphate
  modified_base 11: mod_base = OTHER; note = 2'-O-methylguanosine-3'-phosphate
  modified_base 12: mod_base = OTHER; note = 2'-O-methylguanosine-3'-phosphate
  modified_base 13: mod_base = OTHER; note = 2'-O-methylcytidine-3'-phosphate
  modified_base 14: mod_base = OTHER; note = 2'-deoxy-2'-fluorouridine-3'-phosphate
  modified_base 15: mod_base = OTHER; note = 2'-O-methyladenosine-3'-phosphate
  modified_base 16: mod_base = OTHER; note = 2'-deoxy-2'-fluoroguanosine-3'-phosphate
  modified_base 17: mod_base = OTHER; note = 2'-O-methylcytidine-3'-phosphate
  modified_base 18: mod_base = OTHER; note = 2'-O-methyluridine-3'-phosphate
  modified_base 19: mod_base = OTHER; note = 2'-O-methylcytidine-3'-phosphate
  modified_base 20: mod_base = OTHER; note = 2'-O-methylcytidine-3'-phosphate
  modified_base 21: mod_base = OTHER; note = 2'-O-methyluridine-3'-phosphorothioate
  modified_base 22: mod_base = OTHER; note = 2'-O-methyluridine-3'-phosphorothioate
  modified_base 23: mod_base = OTHER; note = 2'-O-methyladenosine
agacccacgaggctagctcctta

SEQ ID NO: 478 - RNA, 23 nt, synthetic construct
  source 1..23: mol_type = other RNA
  modified_base 1: mod_base = OTHER; note = 2'-O-methyladenosine-3'-phosphorothioate
  modified_base 2: mod_base = OTHER; note = 2'-deoxy-2'-fluoroguanosine-3'-phosphorothioate
  modified_base 3: mod_base = OTHER; note = 2'-O-methylcytidine-3'-phosphate
  modified_base 4: mod_base = OTHER; note = 2'-O-methylcytidine-3'-phosphate
  modified_base 5: mod_base = OTHER; note = 2'-O-methyluridine-3'-phosphate
  modified_base 6: mod_base = OTHER; note = 2'-deoxy-2'-fluorouridine-3'-phosphate
  modified_base 7: mod_base = OTHER; note = 2'-O-methylcytidine-3'-phosphate
  modified_base 8: mod_base = OTHER; note = 2'-deoxy-2'-fluorouridine-3'-phosphate
  modified_base 9: mod_base = OTHER; note = 2'-deoxy-2'-fluoroguanosine-3'-phosphate
  modified_base 10: mod_base = OTHER; note = 2'-O-methyladenosine-3'-phosphate
  modified_base 11: mod_base = OTHER; note = 2'-O-methylcytidine-3'-phosphate
  modified_base 12: mod_base = OTHER; note = 2'-O-methylcytidine-3'-phosphate
  modified_base 13: mod_base = OTHER; note = 2'-O-methylcytidine-3'-phosphate
  modified_base 14: mod_base = OTHER; note = 2'-deoxy-2'-fluoroadenosine-3'-phosphate
  modified_base 15: mod_base = OTHER; note = 2'-O-methylcytidine-3'-phosphate
  modified_base 16: mod_base = OTHER; note = 2'-deoxy-2'-fluoroguanosine-3'-phosphate
  modified_base 17: mod_base = OTHER; note = 2'-O-methyladenosine-3'-phosphate
  modified_base 18: mod_base = OTHER; note = 2'-O-methylguanosine-3'-phosphate
  modified_base 19: mod_base = OTHER; note = 2'-O-methylguanosine-3'-phosphate
  modified_base 20: mod_base = OTHER; note = 2'-O-methylcytidine-3'-phosphate
  modified_base 21: mod_base = OTHER; note = 2'-O-methyluridine-3'-phosphorothioate
  modified_base 22: mod_base = OTHER; note = 2'-O-methyladenosine-3'-phosphorothioate
  modified_base 23: mod_base = OTHER; note = 2'-O-methylguanosine
agccttctgacccacgaggctag

SEQ ID NO: 479 - RNA, 23 nt, synthetic construct
  source 1..23: mol_type = other RNA
  modified_base 1: mod_base = OTHER; note = 2'-O-methyladenosine-3'-phosphorothioate
  modified_base 2: mod_base = OTHER; note = 2'-deoxy-2'-fluorocytidine-3'-phosphorothioate
  modified_base 3: mod_base = OTHER; note = 2'-O-methyluridine-3'-phosphate
  modified_base 4: mod_base = OTHER; note = 2'-O-methylcytidine-3'-phosphate
  modified_base 5: mod_base = OTHER; note = 2'-O-methylcytidine-3'-phosphate
  modified_base 6: mod_base = OTHER; note = 2'-deoxy-2'-fluorouridine-3'-phosphate
  modified_base 7: mod_base = OTHER; note = 2'-O-methylguanosine-3'-phosphate
  modified_base 8: mod_base = OTHER; note = 2'-deoxy-2'-fluoroguanosine-3'-phosphate
  modified_base 9: mod_base = OTHER; note = 2'-deoxy-2'-fluorocytidine-3'-phosphate
  modified_base 10: mod_base = OTHER; note = 2'-O-methylcytidine-3'-phosphate
  modified_base 11: mod_base = OTHER; note = 2'-O-methyluridine-3'-phosphate
  modified_base 12: mod_base = OTHER; note = 2'-O-methyluridine-3'-phosphate
  modified_base 13: mod_base = OTHER; note = 2'-O-methylcytidine-3'-phosphate
  modified_base 14: mod_base = OTHER; note = 2'-deoxy-2'-fluorouridine-3'-phosphate
  modified_base 15: mod_base = OTHER; note = 2'-O-methylguanosine-3'-phosphate
  modified_base 16: mod_base = OTHER; note = 2'-deoxy-2'-fluoroadenosine-3'-phosphate
  modified_base 17: mod_base = OTHER; note = 2'-O-methylcytidine-3'-phosphate
  modified_base 18: mod_base = OTHER; note = 2'-O-methylcytidine-3'-phosphate
  modified_base 19: mod_base = OTHER; note = 2'-O-methylcytidine-3'-phosphate
  modified_base 20: mod_base = OTHER; note = 2'-O-methyladenosine-3'-phosphate
  modified_base 21: mod_base = OTHER; note = 2'-O-methylcytidine-3'-phosphorothioate
  modified_base 22: mod_base = OTHER; note = 2'-O-methylguanosine-3'-phosphorothioate
  modified_base 23: mod_base = OTHER; note = 2'-O-methyladenosine
actcctggccttctgacccacga

SEQ ID NO: 480 - RNA, 23 nt, synthetic construct
  source 1..23: mol_type = other RNA
  modified_base 1: mod_base = OTHER; note = 2'-O-methyladenosine-3'-phosphorothioate
  modified_base 2: mod_base = OTHER; note = 2'-deoxy-2'-fluorocytidine-3'-phosphorothioate
  modified_base 3: mod_base = OTHER; note = 2'-O-methyluridine-3'-phosphate
  modified_base 4: mod_base = OTHER; note = 2'-O-methylcytidine-3'-phosphate
  modified_base 5: mod_base = OTHER; note = 2'-O-methylcytidine-3'-phosphate
  modified_base 6: mod_base = OTHER; note = 2'-deoxy-2'-fluoroadenosine-3'-phosphate
  modified_base 7: mod_base = OTHER; note = 2'-O-methyladenosine-3'-phosphate
  modified_base 8: mod_base = OTHER; note = 2'-deoxy-2'-fluoroguanosine-3'-phosphate
  modified_base 9: mod_base = OTHER; note = 2'-deoxy-2'-fluoroguanosine-3'-phosphate
  modified_base 10: mod_base = OTHER; note = 2'-O-methyladenosine-3'-phosphate
  modified_base 11: mod_base = OTHER; note = 2'-O-methylguanosine-3'-phosphate
  modified_base 12: mod_base = OTHER; note = 2'-O-methylguanosine-3'-phosphate
  modified_base 13: mod_base = OTHER; note = 2'-O-methylcytidine-3'-phosphate
  modified_base 14: mod_base = OTHER; note = 2'-deoxy-2'-fluorouridine-3'-phosphate
  modified_base 15: mod_base = OTHER; note = 2'-O-methylcytidine-3'-phosphate
  modified_base 16: mod_base = OTHER; note = 2'-deoxy-2'-fluorocytidine-3'-phosphate
  modified_base 17: mod_base = OTHER; note = 2'-O-methyluridine-3'-phosphate
  modified_base 18: mod_base = OTHER; note = 2'-O-methylguanosine-3'-phosphate
  modified_base 19: mod_base = OTHER; note = 2'-O-methylguanosine-3'-phosphate
  modified_base 20: mod_base = OTHER; note = 2'-O-methylcytidine-3'-phosphate
  modified_base 21: mod_base = OTHER; note = 2'-O-methylcytidine-3'-phosphorothioate
  modified_base 22: mod_base = OTHER; note = 2'-O-methyluridine-3'-phosphorothioate
  modified_base 23: mod_base = OTHER; note = 2'-O-methyluridine
actccaaggaggctcctggcctt

SEQ ID NO: 481 - RNA, 23 nt, synthetic construct
  source 1..23: mol_type = other RNA
  modified_base 1: mod_base = OTHER; note = 2'-O-methyladenosine-3'-phosphorothioate
  modified_base 2: mod_base = OTHER; note = 2'-deoxy-2'-fluorocytidine-3'-phosphorothioate
  modified_base 3: mod_base = OTHER; note = 2'-O-methyluridine-3'-phosphate
  modified_base 4: mod_base = OTHER; note = 2'-O-methylcytidine-3'-phosphate
  modified_base 5: mod_base = OTHER; note = 2'-O-methyladenosine-3'-phosphate
  modified_base 6: mod_base = OTHER; note = 2'-deoxy-2'-fluoroguanosine-3'-phosphate
  modified_base 7: mod_base = OTHER; note = 2'-O-methylcytidine-3'-phosphate
  modified_base 8: mod_base = OTHER; note = 2'-deoxy-2'-fluorouridine-3'-phosphate
  modified_base 9: mod_base = OTHER; note = 2'-deoxy-2'-fluorocytidine-3'-phosphate
  modified_base 10: mod_base = OTHER; note = 2'-O-methylcytidine-3'-phosphate
  modified_base 11: mod_base = OTHER; note = 2'-O-methyladenosine-3'-phosphate
  modified_base 12: mod_base = OTHER; note = 2'-O-methyladenosine-3'-phosphate
  modified_base 13: mod_base = OTHER; note = 2'-O-methylguanosine-3'-phosphate
  modified_base 14: mod_base = OTHER; note = 2'-deoxy-2'-fluoroguanosine-3'-phosphate
  modified_base 15: mod_base = OTHER; note = 2'-O-methyladenosine-3'-phosphate
  modified_base 16: mod_base = OTHER; note = 2'-deoxy-2'-fluoroguanosine-3'-phosphate
  modified_base 17: mod_base = OTHER; note = 2'-O-methylguanosine-3'-phosphate
  modified_base 18: mod_base = OTHER; note = 2'-O-methylcytidine-3'-phosphate
  modified_base 19: mod_base = OTHER; note = 2'-O-methyluridine-3'-phosphate
  modified_base 20: mod_base = OTHER; note = 2'-O-methylcytidine-3'-phosphate
  modified_base 21: mod_base = OTHER; note = 2'-O-methylcytidine-3'-phosphorothioate
  modified_base 22: mod_base = OTHER; note = 2'-O-methyluridine-3'-phosphorothioate
  modified_base 23: mod_base = OTHER; note = 2'-O-methylguanosine
actcagctccaaggaggctcctg

SEQ ID NO: 482 - RNA, 23 nt, synthetic construct
  source 1..23: mol_type = other RNA
  modified_base 1: mod_base = OTHER; note = 2'-O-methyladenosine-3'-phosphorothioate
  modified_base 2: mod_base = OTHER; note = 2'-deoxy-2'-fluoroadenosine-3'-phosphorothioate
  modified_base 3: mod_base = OTHER; note = 2'-O-methyluridine-3'-phosphate
  modified_base 4: mod_base = OTHER; note = 2'-O-methyladenosine-3'-phosphate
  modified_base 5: mod_base = OTHER; note = 2'-O-methylguanosine-3'-phosphate
  modified_base 6: mod_base = OTHER; note = 2'-deoxy-2'-fluorocytidine-3'-phosphate
  modified_base 7: mod_base = OTHER; note = 2'-O-methyluridine-3'-phosphate
  modified_base 8: mod_base = OTHER; note = 2'-deoxy-2'-fluorouridine-3'-phosphate
  modified_base 9: mod_base = OTHER; note = 2'-deoxy-2'-fluorocytidine-3'-phosphate
  modified_base 10: mod_base = OTHER; note = 2'-O-methyladenosine-3'-phosphate
  modified_base 11: mod_base = OTHER; note = 2'-O-methylguanosine-3'-phosphate
  modified_base 12: mod_base = OTHER; note = 2'-O-methylcytidine-3'-phosphate
  modified_base 13: mod_base = OTHER; note = 2'-O-methylcytidine-3'-phosphate
  modified_base 14: mod_base = OTHER; note = 2'-deoxy-2'-fluoroadenosine-3'-phosphate
  modified_base 15: mod_base = OTHER; note = 2'-O-methylguanosine-3'-phosphate
  modified_base 16: mod_base = OTHER; note = 2'-deoxy-2'-fluorocytidine-3'-phosphate
  modified_base 17: mod_base = OTHER; note = 2'-O-methylcytidine-3'-phosphate
  modified_base 18: mod_base = OTHER; note = 2'-O-methyluridine-3'-phosphate
  modified_base 19: mod_base = OTHER; note = 2'-O-methylcytidine-3'-phosphate
  modified_base 20: mod_base = OTHER; note = 2'-O-methyluridine-3'-phosphate
  modified_base 21: mod_base = OTHER; note = 2'-O-methylcytidine-3'-phosphorothioate
  modified_base 22: mod_base = OTHER; note = 2'-O-methylguanosine-3'-phosphorothioate
  modified_base 23: mod_base = OTHER; note = 2'-O-methylguanosine
aatagcttcagccagcctctcgg

SEQ ID NO: 483 - RNA, 23 nt, synthetic construct
  source 1..23: mol_type = other RNA
  modified_base 1: mod_base = OTHER; note = 2'-O-methyladenosine-3'-phosphorothioate
  modified_base 2: mod_base = OTHER; note = 2'-deoxy-2'-fluorocytidine-3'-phosphorothioate
  modified_base 3: mod_base = OTHER; note = 2'-O-methyladenosine-3'-phosphate
  modified_base 4: mod_base = OTHER; note = 2'-O-methylguanosine-3'-phosphate
  modified_base 5: mod_base = OTHER; note = 2'-O-methyladenosine-3'-phosphate
  modified_base 6: mod_base = OTHER; note = 2'-deoxy-2'-fluoroguanosine-3'-phosphate
  modified_base 7: mod_base = OTHER; note = 2'-O-methyluridine-3'-phosphate
  modified_base 8: mod_base = OTHER; note = 2'-deoxy-2'-fluorocytidine-3'-phosphate
  modified_base 9: mod_base = OTHER; note = 2'-deoxy-2'-fluorocytidine-3'-phosphate
  modified_base 10: mod_base = OTHER; note = 2'-O-methyladenosine-3'-phosphate
  modified_base 11: mod_base = OTHER; note = 2'-O-methyluridine-3'-phosphate
  modified_base 12: mod_base = OTHER; note = 2'-O-methyladenosine-3'-phosphate
  modified_base 13: mod_base = OTHER; note = 2'-O-methylguanosine-3'-phosphate
  modified_base 14: mod_base = OTHER; note = 2'-deoxy-2'-fluorocytidine-3'-phosphate
  modified_base 15: mod_base = OTHER; note = 2'-O-methyluridine-3'-phosphate
  modified_base 16: mod_base = OTHER; note = 2'-deoxy-2'-fluorouridine-3'-phosphate
  modified_base 17: mod_base = OTHER; note = 2'-O-methylcytidine-3'-phosphate
  modified_base 18: mod_base = OTHER; note = 2'-O-methyladenosine-3'-phosphate
  modified_base 19: mod_base = OTHER; note = 2'-O-methylguanosine-3'-phosphate
  modified_base 20: mod_base = OTHER; note = 2'-O-methylcytidine-3'-phosphate
  modified_base 21: mod_base = OTHER; note = 2'-O-methylcytidine-3'-phosphorothioate
  modified_base 22: mod_base = OTHER; note = 2'-O-methyladenosine-3'-phosphorothioate
  modified_base 23: mod_base = OTHER; note = 2'-O-methylguanosine
acagagtccatagcttcagccag

SEQ ID NO: 484 - RNA, 23 nt, synthetic construct
  source 1..23: mol_type = other RNA
  modified_base 1: mod_base = OTHER; note = 2'-O-methyladenosine-3'-phosphorothioate
  modified_base 2: mod_base = OTHER; note = 2'-deoxy-2'-fluorouridine-3'-phosphorothioate
  modified_base 3: mod_base = OTHER; note = 2'-O-methyluridine-3'-phosphate
  modified_base 4: mod_base = OTHER; note = 2'-O-methylcytidine-3'-phosphate
  modified_base 5: mod_base = OTHER; note = 2'-O-methyluridine-3'-phosphate
  modified_base 6: mod_base = OTHER; note = 2'-deoxy-2'-fluoroguanosine-3'-phosphate
  modified_base 7: mod_base = OTHER; note = 2'-O-methylcytidine-3'-phosphate
  modified_base 8: mod_base = OTHER; note = 2'-deoxy-2'-fluorocytidine-3'-phosphate
  modified_base 9: mod_base = OTHER; note = 2'-deoxy-2'-fluorocytidine-3'-phosphate
  modified_base 10: mod_base = OTHER; note = 2'-O-methyladenosine-3'-phosphate
  modified_base 11: mod_base = OTHER; note = 2'-O-methylguanosine-3'-phosphate
  modified_base 12: mod_base = OTHER; note = 2'-O-methyladenosine-3'-phosphate
  modified_base 13: mod_base = OTHER; note = 2'-O-methylguanosine-3'-phosphate
  modified_base 14: mod_base = OTHER; note = 2'-deoxy-2'-fluorouridine-3'-phosphate
  modified_base 15: mod_base = OTHER; note = 2'-O-methylcytidine-3'-phosphate
  modified_base 16: mod_base = OTHER; note = 2'-deoxy-2'-fluorocytidine-3'-phosphate
  modified_base 17: mod_base = OTHER; note = 2'-O-methyladenosine-3'-phosphate
  modified_base 18: mod_base = OTHER; note = 2'-O-methyluridine-3'-phosphate
  modified_base 19: mod_base = OTHER; note = 2'-O-methyladenosine-3'-phosphate
  modified_base 20: mod_base = OTHER; note = 2'-O-methylguanosine-3'-phosphate
  modified_base 21: mod_base = OTHER; note = 2'-O-methylcytidine-3'-phosphorothioate
  modified_base 22: mod_base = OTHER; note = 2'-O-methyluridine-3'-phosphorothioate
  modified_base 23: mod_base = OTHER; note = 2'-O-methyluridine
attctgcccagagtccatagctt

SEQ ID NO: 485 - RNA, 23 nt, synthetic construct
  source 1..23: mol_type = other RNA
  modified_base 1: mod_base = OTHER; note = 2'-O-methyladenosine-3'-phosphorothioate
  modified_base 2: mod_base = OTHER; note = 2'-deoxy-2'-fluorocytidine-3'-phosphorothioate
  modified_base 3: mod_base = OTHER; note = 2'-O-methylcytidine-3'-phosphate
  modified_base 4: mod_base = OTHER; note = 2'-O-methyluridine-3'-phosphate
  modified_base 5: mod_base = OTHER; note = 2'-O-methylguanosine-3'-phosphate
  modified_base 6: mod_base = OTHER; note = 2'-deoxy-2'-fluoroguanosine-3'-phosphate
  modified_base 7: mod_base = OTHER; note = 2'-O-methyladenosine-3'-phosphate
  modified_base 8: mod_base = OTHER; note = 2'-deoxy-2'-fluoroguanosine-3'-phosphate
  modified_base 9: mod_base = OTHER; note = 2'-deoxy-2'-fluoroguanosine-3'-phosphate
  modified_base 10: mod_base = OTHER; note = 2'-O-methyluridine-3'-phosphate
  modified_base 11: mod_base = OTHER; note = 2'-O-methyluridine-3'-phosphate
  modified_base 12: mod_base = OTHER; note = 2'-O-methylcytidine-3'-phosphate
  modified_base 13: mod_base = OTHER; note = 2'-O-methyluridine-3'-phosphate
  modified_base 14: mod_base = OTHER; note = 2'-deoxy-2'-fluoroguanosine-3'-phosphate
  modified_base 15: mod_base = OTHER; note = 2'-O-methylcytidine-3'-phosphate
  modified_base 16: mod_base = OTHER; note = 2'-deoxy-2'-fluorocytidine-3'-phosphate
  modified_base 17: mod_base = OTHER; note = 2'-O-methylcytidine-3'-phosphate
  modified_base 18: mod_base = OTHER; note = 2'-O-methyladenosine-3'-phosphate
  modified_base 19: mod_base = OTHER; note = 2'-O-methylguanosine-3'-phosphate
  modified_base 20: mod_base = OTHER; note = 2'-O-methyladenosine-3'-phosphate
  modified_base 21: mod_base = OTHER; note = 2'-O-methylguanosine-3'-phosphorothioate
  modified_base 22: mod_base = OTHER; note = 2'-O-methyluridine-3'-phosphorothioate
  modified_base 23: mod_base = OTHER; note = 2'-O-methylcytidine
acctggaggttctgcccagagtc

SEQ ID NO: 486 - RNA, 23 nt, synthetic construct
  source 1..23: mol_type = other RNA
  modified_base 1: mod_base = OTHER; note = 2'-O-methyladenosine-3'-phosphorothioate
  modified_base 2: mod_base = OTHER; note = 2'-deoxy-2'-fluoroguanosine-3'-phosphorothioate
  modified_base 3: mod_base = OTHER; note = 2'-O-methylguanosine-3'-phosphate
  modified_base 4: mod_base = OTHER; note = 2'-O-methylcytidine-3'-phosphate
  modified_base 5: mod_base = OTHER; note = 2'-O-methyladenosine-3'-phosphate
  modified_base 6: mod_base = OTHER; note = 2'-deoxy-2'-fluoroguanosine-3'-phosphate
  modified_base 7: mod_base = OTHER; note = 2'-O-methylguanosine-3'-phosphate
  modified_base 8: mod_base = OTHER; note = 2'-deoxy-2'-fluoroadenosine-3'-phosphate
  modified_base 9: mod_base = OTHER; note = 2'-deoxy-2'-fluoroguanosine-3'-phosphate
  modified_base 10: mod_base = OTHER; note = 2'-O-methyladenosine-3'-phosphate
  modified_base 11: mod_base = OTHER; note = 2'-O-methylcytidine-3'-phosphate
  modified_base 12: mod_base = OTHER; note = 2'-O-methylcytidine-3'-phosphate
  modified_base 13: mod_base = OTHER; note = 2'-O-methyluridine-3'-phosphate
  modified_base 14: mod_base = OTHER; note = 2'-deoxy-2'-fluoroguanosine-3'-phosphate
  modified_base 15: mod_base = OTHER; note = 2'-O-methylguanosine-3'-phosphate
  modified_base 16: mod_base = OTHER; note = 2'-deoxy-2'-fluoroadenosine-3'-phosphate
  modified_base 17: mod_base = OTHER; note = 2'-O-methylguanosine-3'-phosphate
  modified_base 18: mod_base = OTHER; note = 2'-O-methylguanosine-3'-phosphate
  modified_base 19: mod_base = OTHER; note = 2'-O-methyluridine-3'-phosphate
  modified_base 20: mod_base = OTHER; note = 2'-O-methyluridine-3'-phosphate
  modified_base 21: mod_base = OTHER; note = 2'-O-methylcytidine-3'-phosphorothioate
  modified_base 22: mod_base = OTHER; note = 2'-O-methyluridine-3'-phosphorothioate
  modified_base 23: mod_base = OTHER; note = 2'-O-methylguanosine
aggcaggagacctggaggttctg

SEQ ID NO: 487 - RNA, 23 nt, synthetic construct
  source 1..23: mol_type = other RNA
  modified_base 1: mod_base = OTHER; note = 2'-O-methyladenosine-3'-phosphorothioate
  modified_base 2: mod_base = OTHER; note = 2'-deoxy-2'-fluoroadenosine-3'-phosphorothioate
  modified_base 3: mod_base = OTHER; note = 2'-O-methyluridine-3'-phosphate
  modified_base 4: mod_base = OTHER; note = 2'-O-methyluridine-3'-phosphate
  modified_base 5: mod_base = OTHER; note = 2'-O-methylguanosine-3'-phosphate
  modified_base 6: mod_base = OTHER; note = 2'-deoxy-2'-fluoroadenosine-3'-phosphate
  modified_base 7: mod_base = OTHER; note = 2'-O-methylguanosine-3'-phosphate
  modified_base 8: mod_base = OTHER; note = 2'-deoxy-2'-fluoroguanosine-3'-phosphate
  modified_base 9: mod_base = OTHER; note = 2'-deoxy-2'-fluorocytidine-3'-phosphate
  modified_base 10: mod_base = OTHER; note = 2'-O-methyladenosine-3'-phosphate
  modified_base 11: mod_base = OTHER; note = 2'-O-methylguanosine-3'-phosphate
  modified_base 12: mod_base = OTHER; note = 2'-O-methylguanosine-3'-phosphate
  modified_base 13: mod_base = OTHER; note = 2'-O-methyladenosine-3'-phosphate
  modified_base 14: mod_base = OTHER; note = 2'-deoxy-2'-fluoroguanosine-3'-phosphate
  modified_base 15: mod_base = OTHER; note = 2'-O-methyladenosine-3'-phosphate
  modified_base 16: mod_base = OTHER; note = 2'-deoxy-2'-fluorocytidine-3'-phosphate
  modified_base 17: mod_base = OTHER; note = 2'-O-methylcytidine-3'-phosphate
  modified_base 18: mod_base = OTHER; note = 2'-O-methyluridine-3'-phosphate
  modified_base 19: mod_base = OTHER; note = 2'-O-methylguanosine-3'-phosphate
  modified_base 20: mod_base = OTHER; note = 2'-O-methylguanosine-3'-phosphate
  modified_base 21: mod_base = OTHER; note = 2'-O-methyladenosine-3'-phosphorothioate
  modified_base 22: mod_base = OTHER; note = 2'-O-methylguanosine-3'-phosphorothioate
  modified_base 23: mod_base = OTHER; note = 2'-O-methylguanosine
aattgaggcaggagacctggagg

SEQ ID NO: 488 - RNA, 23 nt, synthetic construct
  source 1..23: mol_type = other RNA
  modified_base 1: mod_base = OTHER; note = 2'-O-methyladenosine-3'-phosphorothioate
  modified_base 2: mod_base = OTHER; note = 2'-deoxy-2'-fluorouridine-3'-phosphorothioate
  modified_base 3: mod_base = OTHER; note = 2'-O-methylguanosine-3'-phosphate
  modified_base 4: mod_base = OTHER; note = 2'-O-methylcytidine-3'-phosphate
  modified_base 5: mod_base = OTHER; note = 2'-O-methyluridine-3'-phosphate
  modified_base 6: mod_base = OTHER; note = 2'-deoxy-2'-fluorocytidine-3'-phosphate
  modified_base 7: mod_base = OTHER; note = 2'-O-methyladenosine-3'-phosphate
  modified_base 8: mod_base = OTHER; note = 2'-deoxy-2'-fluoroguanosine-3'-phosphate
  modified_base 9: mod_base = OTHER; note = 2'-deoxy-2'-fluorocytidine-3'-phosphate
  modified_base 10: mod_base = OTHER; note = 2'-O-methyladenosine-3'-phosphate
  modified_base 11: mod_base = OTHER; note = 2'-O-methyluridine-3'-phosphate
  modified_base 12: mod_base = OTHER; note = 2'-O-methyluridine-3'-phosphate
  modified_base 13: mod_base = OTHER; note = 2'-O-methylguanosine-3'-phosphate
  modified_base 14: mod_base = OTHER; note = 2'-deoxy-2'-fluoroadenosine-3'-phosphate
  modified_base 15: mod_base = OTHER; note = 2'-O-methylguanosine-3'-phosphate
  modified_base 16: mod_base = OTHER; note = 2'-deoxy-2'-fluoroguanosine-3'-phosphate
  modified_base 17: mod_base = OTHER; note = 2'-O-methylcytidine-3'-phosphate
  modified_base 18: mod_base = OTHER; note = 2'-O-methyladenosine-3'-phosphate
  modified_base 19: mod_base = OTHER; note = 2'-O-methylguanosine-3'-phosphate
  modified_base 20: mod_base = OTHER; note = 2'-O-methylguanosine-3'-phosphate
  modified_base 21: mod_base = OTHER; note = 2'-O-methyladenosine-3'-phosphorothioate
  modified_base 22: mod_base = OTHER; note = 2'-O-methylguanosine-3'-phosphorothioate
  modified_base 23: mod_base = OTHER; note = 2'-O-methyladenosine
atgctcagcattgaggcaggaga

SEQ ID NO: 489 - RNA, 23 nt, synthetic construct
  source 1..23: mol_type = other RNA
  modified_base 1: mod_base = OTHER; note = 2'-O-methyladenosine-3'-phosphorothioate
  modified_base 2: mod_base = OTHER; note = 2'-deoxy-2'-fluorocytidine-3'-phosphorothioate
  modified_base 3: mod_base = OTHER; note = 2'-O-methyluridine-3'-phosphate
  modified_base 4: mod_base = OTHER; note = 2'-O-methylguanosine-3'-phosphate
  modified_base 5: mod_base = OTHER; note = 2'-O-methylguanosine-3'-phosphate
  modified_base 6: mod_base = OTHER; note = 2'-deoxy-2'-fluorouridine-3'-phosphate
  modified_base 7: mod_base = OTHER; note = 2'-O-methyluridine-3'-phosphate
  modified_base 8: mod_base = OTHER; note = 2'-deoxy-2'-fluorocytidine-3'-phosphate
  modified_base 9: mod_base = OTHER; note = 2'-deoxy-2'-fluorouridine-3'-phosphate
  modified_base 10: mod_base = OTHER; note = 2'-O-methylguanosine-3'-phosphate
  modified_base 11: mod_base = OTHER; note = 2'-O-methylcytidine-3'-phosphate
  modified_base 12: mod_base = OTHER; note = 2'-O-methyluridine-3'-phosphate
  modified_base 13: mod_base = OTHER; note = 2'-O-methylcytidine-3'-phosphate
  modified_base 14: mod_base = OTHER; note = 2'-deoxy-2'-fluoroadenosine-3'-phosphate
  modified_base 15: mod_base = OTHER; note = 2'-O-methylguanosine-3'-phosphate
  modified_base 16: mod_base = OTHER; note = 2'-deoxy-2'-fluorocytidine-3'-phosphate
  modified_base 17: mod_base = OTHER; note = 2'-O-methyladenosine-3'-phosphate
  modified_base 18: mod_base = OTHER; note = 2'-O-methyluridine-3'-phosphate
  modified_base 19: mod_base = OTHER; note = 2'-O-methyluridine-3'-phosphate
  modified_base 20: mod_base = OTHER; note = 2'-O-methylguanosine-3'-phosphate
  modified_base 21: mod_base = OTHER; note = 2'-O-methyladenosine-3'-phosphorothioate
  modified_base 22: mod_base = OTHER; note = 2'-O-methylguanosine-3'-phosphorothioate
  modified_base 23: mod_base = OTHER; note = 2'-O-methylguanosine
actggttctgctcagcattgagg

SEQ ID NO: 490 - RNA, 23 nt, synthetic construct
  source 1..23: mol_type = other RNA
  modified_base 1: mod_base = OTHER; note = 2'-O-methyladenosine-3'-phosphorothioate
  modified_base 2: mod_base = OTHER; note = 2'-deoxy-2'-fluoroadenosine-3'-phosphorothioate
  modified_base 3: mod_base = OTHER; note = 2'-O-methylguanosine-3'-phosphate
  modified_base 4: mod_base = OTHER; note = 2'-O-methylguanosine-3'-phosphate
  modified_base 5: mod_base = OTHER; note = 2'-O-methyluridine-3'-phosphate
  modified_base 6: mod_base = OTHER; note = 2'-deoxy-2'-fluoroguanosine-3'-phosphate
  modified_base 7: mod_base = OTHER; note = 2'-O-methylcytidine-3'-phosphate
  modified_base 8: mod_base = OTHER; note = 2'-deoxy-2'-fluorouridine-3'-phosphate
  modified_base 9: mod_base = OTHER; note = 2'-deoxy-2'-fluoroguanosine-3'-phosphate
  modified_base 10: mod_base = OTHER; note = 2'-O-methylguanosine-3'-phosphate
  modified_base 11: mod_base = OTHER; note = 2'-O-methyluridine-3'-phosphate
  modified_base 12: mod_base = OTHER; note = 2'-O-methyluridine-3'-phosphate
  modified_base 13: mod_base = OTHER; note = 2'-O-methylcytidine-3'-phosphate
  modified_base 14: mod_base = OTHER; note = 2'-deoxy-2'-fluorouridine-3'-phosphate
  modified_base 15: mod_base = OTHER; note = 2'-O-methylguanosine-3'-phosphate
  modified_base 16: mod_base = OTHER; note = 2'-deoxy-2'-fluorocytidine-3'-phosphate
  modified_base 17: mod_base = OTHER; note = 2'-O-methyluridine-3'-phosphate
  modified_base 18: mod_base = OTHER; note = 2'-O-methylcytidine-3'-phosphate
  modified_base 19: mod_base = OTHER; note = 2'-O-methyladenosine-3'-phosphate
  modified_base 20: mod_base = OTHER; note = 2'-O-methylguanosine-3'-phosphate
  modified_base 21: mod_base = OTHER; note = 2'-O-methylcytidine-3'-phosphorothioate
  modified_base 22: mod_base = OTHER; note = 2'-O-methyladenosine-3'-phosphorothioate
  modified_base 23: mod_base = OTHER; note = 2'-O-methyluridine
aaggtgctggttctgctcagcat

SEQ ID NO: 491 - RNA, 23 nt, synthetic construct
  source 1..23: mol_type = other RNA
  modified_base 1: mod_base = OTHER; note = 2'-O-methyladenosine-3'-phosphorothioate
  modified_base 2: mod_base = OTHER; note = 2'-deoxy-2'-fluorocytidine-3'-phosphorothioate
  modified_base 3: mod_base = OTHER; note = 2'-O-methyladenosine-3'-phosphate
  modified_base 4: mod_base = OTHER; note = 2'-O-methyluridine-3'-phosphate
  modified_base 5: mod_base = OTHER; note = 2'-O-methyladenosine-3'-phosphate
  modified_base 6: mod_base = OTHER; note = 2'-deoxy-2'-fluorocytidine-3'-phosphate
  modified_base 7: mod_base = OTHER; note = 2'-O-methyluridine-3'-phosphate
  modified_base 8: mod_base = OTHER; note = 2'-deoxy-2'-fluoroguanosine-3'-phosphate
  modified_base 9: mod_base = OTHER; note = 2'-deoxy-2'-fluorouridine-3'-phosphate
  modified_base 10: mod_base = OTHER; note = 2'-O-methylguanosine-3'-phosphate
  modified_base 11: mod_base = OTHER; note = 2'-O-methylcytidine-3'-phosphate
  modified_base 12: mod_base = OTHER; note = 2'-O-methylcytidine-3'-phosphate
  modified_base 13: mod_base = OTHER; note = 2'-O-methyladenosine-3'-phosphate
  modified_base 14: mod_base = OTHER; note = 2'-deoxy-2'-fluorocytidine-3'-phosphate
  modified_base 15: mod_base = OTHER; note = 2'-O-methylcytidine-3'-phosphate
  modified_base 16: mod_base = OTHER; note = 2'-deoxy-2'-fluorocytidine-3'-phosphate
  modified_base 17: mod_base = OTHER; note = 2'-O-methylguanosine-3'-phosphate
  modified_base 18: mod_base = OTHER; note = 2'-O-methyladenosine-3'-phosphate
  modified_base 19: mod_base = OTHER; note = 2'-O-methyluridine-3'-phosphate
  modified_base 20: mod_base = OTHER; note = 2'-O-methylguanosine-3'-phosphate
  modified_base 21: mod_base = OTHER; note = 2'-O-methylcytidine-3'-phosphorothioate
  modified_base 22: mod_base = OTHER; note = 2'-O-methyladenosine-3'-phosphorothioate
  modified_base 23: mod_base = OTHER; note = 2'-O-methylguanosine
acatactgtgccacccgatgcag

SEQ ID NO: 492 - RNA, 23 nt, synthetic construct
  source 1..23: mol_type = other RNA
  modified_base 1: mod_base = OTHER; note = 2'-O-methyladenosine-3'-phosphorothioate
  modified_base 2: mod_base = OTHER; note = 2'-deoxy-2'-fluorouridine-3'-phosphorothioate
  modified_base 3: mod_base = OTHER; note = 2'-O-methyladenosine-3'-phosphate
  modified_base 4: mod_base = OTHER; note = 2'-O-methylcytidine-3'-phosphate
  modified_base 5: mod_base = OTHER; note = 2'-O-methyluridine-3'-phosphate
  modified_base 6: mod_base = OTHER; note = 2'-deoxy-2'-fluorocytidine-3'-phosphate
  modified_base 7: mod_base = OTHER; note = 2'-O-methylcytidine-3'-phosphate
  modified_base 8: mod_base = OTHER; note = 2'-deoxy-2'-fluoroguanosine-3'-phosphate
  modified_base 9: mod_base = OTHER; note = 2'-deoxy-2'-fluorocytidine-3'-phosphate
  modified_base 10: mod_base = OTHER; note = 2'-O-methyladenosine-3'-phosphate
  modified_base 11: mod_base = OTHER; note = 2'-O-methyluridine-3'-phosphate
  modified_base 12: mod_base = OTHER; note = 2'-O-methylcytidine-3'-phosphate
  modified_base 13: mod_base = OTHER; note = 2'-O-methylcytidine-3'-phosphate
  modified_base 14: mod_base = OTHER; note = 2'-deoxy-2'-fluoroadenosine-3'-phosphate
  modified_base 15: mod_base = OTHER; note = 2'-O-methylcytidine-3'-phosphate
  modified_base 16: mod_base = OTHER; note = 2'-deoxy-2'-fluorocytidine-3'-phosphate
  modified_base 17: mod_base = OTHER; note = 2'-O-methyladenosine-3'-phosphate
  modified_base 18: mod_base = OTHER; note = 2'-O-methylguanosine-3'-phosphate
  modified_base 19: mod_base = OTHER; note = 2'-O-methylguanosine-3'-phosphate
  modified_base 20: mod_base = OTHER; note = 2'-O-methyladenosine-3'-phosphate
  modified_base 21: mod_base = OTHER; note = 2'-O-methylguanosine-3'-phosphorothioate
  modified_base 22: mod_base = OTHER; note = 2'-O-methylcytidine-3'-phosphorothioate
  modified_base 23: mod_base = OTHER; note = 2'-O-methylcytidine
atactccgcatccaccaggagcc

SEQ ID NO: 493 - RNA, 23 nt, synthetic construct
  source 1..23: mol_type = other RNA
  modified_base 1: mod_base = OTHER; note = 2'-O-methyladenosine-3'-phosphorothioate
  modified_base 2: mod_base = OTHER; note = 2'-deoxy-2'-fluorouridine-3'-phosphorothioate
  modified_base 3: mod_base = OTHER; note = 2'-O-methylguanosine-3'-phosphate
  modified_base 4: mod_base = OTHER; note = 2'-O-methyladenosine-3'-phosphate
  modified_base 5: mod_base = OTHER; note = 2'-O-methylguanosine-3'-phosphate
  modified_base 6: mod_base = OTHER; note = 2'-deoxy-2'-fluoroguanosine-3'-phosphate
  modified_base 7: mod_base = OTHER; note = 2'-O-methyluridine-3'-phosphate
  modified_base 8: mod_base = OTHER; note = 2'-deoxy-2'-fluoroguanosine-3'-phosphate
  modified_base 9: mod_base = OTHER; note = 2'-deoxy-2'-fluorouridine-3'-phosphate
  modified_base 10: mod_base = OTHER; note = 2'-O-methyladenosine-3'-phosphate
  modified_base 11: mod_base = OTHER; note = 2'-O-methylcytidine-3'-phosphate
  modified_base 12: mod_base = OTHER; note = 2'-O-methyluridine-3'-phosphate
  modified_base 13: mod_base = OTHER; note = 2'-O-methylcytidine-3'-phosphate
  modified_base 14: mod_base = OTHER; note = 2'-deoxy-2'-fluorocytidine-3'-phosphate
  modified_base 15: mod_base = OTHER; note = 2'-O-methylguanosine-3'-phosphate
  modified_base 16: mod_base = OTHER; note = 2'-deoxy-2'-fluorocytidine-3'-phosphate
  modified_base 17: mod_base = OTHER; note = 2'-O-methyladenosine-3'-phosphate
  modified_base 18: mod_base = OTHER; note = 2'-O-methyluridine-3'-phosphate
  modified_base 19: mod_base = OTHER; note = 2'-O-methylcytidine-3'-phosphate
  modified_base 20: mod_base = OTHER; note = 2'-O-methylcytidine-3'-phosphate
  modified_base 21: mod_base = OTHER; note = 2'-O-methyladenosine-3'-phosphorothioate
  modified_base 22: mod_base = OTHER; note = 2'-O-methylcytidine-3'-phosphorothioate
  modified_base 23: mod_base = OTHER; note = 2'-O-methylcytidine
atgaggtgtactccgcatccacc

SEQ ID NO: 494 - RNA, 23 nt, synthetic construct
  source 1..23: mol_type = other RNA
  modified_base 1: mod_base = OTHER; note = 2'-O-methyladenosine-3'-phosphorothioate
  modified_base 2: mod_base = OTHER; note = 2'-deoxy-2'-fluorouridine-3'-phosphorothioate
  modified_base 3: mod_base = OTHER; note = 2'-O-methyluridine-3'-phosphate
  modified_base 4: mod_base = OTHER; note = 2'-O-methylcytidine-3'-phosphate
  modified_base 5: mod_base = OTHER; note = 2'-O-methyladenosine-3'-phosphate
  modified_base 6: mod_base = OTHER; note = 2'-deoxy-2'-fluoroguanosine-3'-phosphate
  modified_base 7: mod_base = OTHER; note = 2'-O-methyluridine-3'-phosphate
  modified_base 8: mod_base = OTHER; note = 2'-deoxy-2'-fluoroguanosine-3'-phosphate
  modified_base 9: mod_base = OTHER; note = 2'-deoxy-2'-fluoroadenosine-3'-phosphate
  modified_base 10: mod_base = OTHER; note = 2'-O-methylguanosine-3'-phosphate
  modified_base 11: mod_base = OTHER; note = 2'-O-methylguanosine-3'-phosphate
  modified_base 12: mod_base = OTHER; note = 2'-O-methyluridine-3'-phosphate
  modified_base 13: mod_base = OTHER; note = 2'-O-methylguanosine-3'-phosphate
  modified_base 14: mod_base = OTHER; note = 2'-deoxy-2'-fluorouridine-3'-phosphate
  modified_base 15: mod_base = OTHER; note = 2'-O-methyladenosine-3'-phosphate
  modified_base 16: mod_base = OTHER; note = 2'-deoxy-2'-fluorocytidine-3'-phosphate
  modified_base 17: mod_base = OTHER; note = 2'-O-methyluridine-3'-phosphate
  modified_base 18: mod_base = OTHER; note = 2'-O-methylcytidine-3'-phosphate
  modified_base 19: mod_base = OTHER; note = 2'-O-methylcytidine-3'-phosphate
  modified_base 20: mod_base = OTHER; note = 2'-O-methylguanosine-3'-phosphate
  modified_base 21: mod_base = OTHER; note = 2'-O-methylcytidine-3'-phosphorothioate
  modified_base 22: mod_base = OTHER; note = 2'-O-methyladenosine-3'-phosphorothioate
  modified_base 23: mod_base = OTHER; note = 2'-O-methyluridine
attcagtgaggtgtactccgcat

SEQ ID NO: 495 - RNA, 23 nt, synthetic construct
  source 1..23: mol_type = other RNA
  modified_base 1: mod_base = OTHER; note = 2'-O-methyladenosine-3'-phosphorothioate
  modified_base 2: mod_base = OTHER; note = 2'-deoxy-2'-fluorocytidine-3'-phosphorothioate
  modified_base 3: mod_base = OTHER; note = 2'-O-methyladenosine-3'-phosphate
  modified_base 4: mod_base = OTHER; note = 2'-O-methylguanosine-3'-phosphate
  modified_base 5: mod_base = OTHER; note = 2'-O-methylguanosine-3'-phosphate
  modified_base 6: mod_base = OTHER; note = 2'-deoxy-2'-fluoroguanosine-3'-phosphate
  modified_base 7: mod_base = OTHER; note = 2'-O-methyluridine-3'-phosphate
  modified_base 8: mod_base = OTHER; note = 2'-deoxy-2'-fluorouridine-3'-phosphate
  modified_base 9: mod_base = OTHER; note = 2'-deoxy-2'-fluorocytidine-3'-phosphate
  modified_base 10: mod_base = OTHER; note = 2'-O-methyladenosine-3'-phosphate
  modified_base 11: mod_base = OTHER; note = 2'-O-methylguanosine-3'-phosphate
  modified_base 12: mod_base = OTHER; note = 2'-O-methyluridine-3'-phosphate
  modified_base 13: mod_base = OTHER; note = 2'-O-methylguanosine-3'-phosphate
  modified_base 14: mod_base = OTHER; note = 2'-deoxy-2'-fluoroadenosine-3'-phosphate
  modified_base 15: mod_base = OTHER; note = 2'-O-methylguanosine-3'-phosphate
  modified_base 16: mod_base = OTHER; note = 2'-deoxy-2'-fluoroguanosine-3'-phosphate
  modified_base 17: mod_base = OTHER; note = 2'-O-methyluridine-3'-phosphate
  modified_base 18: mod_base = OTHER; note = 2'-O-methylguanosine-3'-phosphate
  modified_base 19: mod_base = OTHER; note = 2'-O-methyluridine-3'-phosphate
  modified_base 20: mod_base = OTHER; note = 2'-O-methyladenosine-3'-phosphate
  modified_base 21: mod_base = OTHER; note = 2'-O-methylcytidine-3'-phosphorothioate
  modified_base 22: mod_base = OTHER; note = 2'-O-methyluridine-3'-phosphorothioate
  modified_base 23: mod_base = OTHER; note = 2'-O-methylcytidine
acagggttcagtgaggtgtactc

SEQ ID NO: 496 - RNA, 23 nt, synthetic construct
  source 1..23: mol_type = other RNA
  modified_base 1: mod_base = OTHER; note = 2'-O-methyladenosine-3'-phosphorothioate
  modified_base 2: mod_base = OTHER; note = 2'-deoxy-2'-fluoroguanosine-3'-phosphorothioate
  modified_base 3: mod_base = OTHER; note = 2'-O-methyladenosine-3'-phosphate
  modified_base 4: mod_base = OTHER; note = 2'-O-methylguanosine-3'-phosphate
  modified_base 5: mod_base = OTHER; note = 2'-O-methyladenosine-3'-phosphate
  modified_base 6: mod_base = OTHER; note = 2'-deoxy-2'-fluoroguanosine-3'-phosphate
  modified_base 7: mod_base = OTHER; note = 2'-O-methylcytidine-3'-phosphate
  modified_base 8: mod_base = OTHER; note = 2'-deoxy-2'-fluoroguanosine-3'-phosphate
  modified_base 9: mod_base = OTHER; note = 2'-deoxy-2'-fluorocytidine-3'-phosphate
  modified_base 10: mod_base = OTHER; note = 2'-O-methyladenosine-3'-phosphate
  modified_base 11: mod_base = OTHER; note = 2'-O-methylguanosine-3'-phosphate
  modified_base 12: mod_base = OTHER; note = 2'-O-methylguanosine-3'-phosphate
  modified_base 13: mod_base = OTHER; note = 2'-O-methylguanosine-3'-phosphate
  modified_base 14: mod_base = OTHER; note = 2'-deoxy-2'-fluorouridine-3'-phosphate
  modified_base 15: mod_base = OTHER; note = 2'-O-methyluridine-3'-phosphate
  modified_base 16: mod_base = OTHER; note = 2'-deoxy-2'-fluorocytidine-3'-phosphate
  modified_base 17: mod_base = OTHER; note = 2'-O-methyladenosine-3'-phosphate
  modified_base 18: mod_base = OTHER; note = 2'-O-methylguanosine-3'-phosphate
  modified_base 19: mod_base = OTHER; note = 2'-O-methyluridine-3'-phosphate
  modified_base 20: mod_base = OTHER; note = 2'-O-methylguanosine-3'-phosphate
  modified_base 21: mod_base = OTHER; note = 2'-O-methyladenosine-3'-phosphorothioate
  modified_base 22: mod_base = OTHER; note = 2'-O-methylguanosine-3'-phosphorothioate
  modified_base 23: mod_base = OTHER; note = 2'-O-methylguanosine
agagagcgcagggttcagtgagg

SEQ ID NO: 497 - RNA, 23 nt, synthetic construct
  source 1..23: mol_type = other RNA
  modified_base 1: mod_base = OTHER; note = 2'-O-methyladenosine-3'-phosphorothioate
  modified_base 2: mod_base = OTHER; note = 2'-deoxy-2'-fluoroadenosine-3'-phosphorothioate
  modified_base 3: mod_base = OTHER; note = 2'-O-methylguanosine-3'-phosphate
  modified_base 4: mod_base = OTHER; note = 2'-O-methylcytidine-3'-phosphate
  modified_base 5: mod_base = OTHER; note = 2'-O-methyladenosine-3'-phosphate
  modified_base 6: mod_base = OTHER; note = 2'-deoxy-2'-fluoroguanosine-3'-phosphate
  modified_base 7: mod_base = OTHER; note = 2'-O-methylcytidine-3'-phosphate
  modified_base 8: mod_base = OTHER; note = 2'-deoxy-2'-fluoroguanosine-3'-phosphate
  modified_base 9: mod_base = OTHER; note = 2'-deoxy-2'-fluoroadenosine-3'-phosphate
  modified_base 10: mod_base = OTHER; note = 2'-O-methylguanosine-3'-phosphate
  modified_base 11: mod_base = OTHER; note = 2'-O-methyladenosine-3'-phosphate
  modified_base 12: mod_base = OTHER; note = 2'-O-methylguanosine-3'-phosphate
  modified_base 13: mod_base = OTHER; note = 2'-O-methylcytidine-3'-phosphate
  modified_base 14: mod_base = OTHER; note = 2'-deoxy-2'-fluoroguanosine-3'-phosphate
  modified_base 15: mod_base = OTHER; note = 2'-O-methylcytidine-3'-phosphate
  modified_base 16: mod_base = OTHER; note = 2'-deoxy-2'-fluoroadenosine-3'-phosphate
  modified_base 17: mod_base = OTHER; note = 2'-O-methylguanosine-3'-phosphate
  modified_base 18: mod_base = OTHER; note = 2'-O-methylguanosine-3'-phosphate
  modified_base 19: mod_base = OTHER; note = 2'-O-methylguanosine-3'-phosphate
  modified_base 20: mod_base = OTHER; note = 2'-O-methyluridine-3'-phosphate
  modified_base 21: mod_base = OTHER; note = 2'-O-methyluridine-3'-phosphorothioate
  modified_base 22: mod_base = OTHER; note = 2'-O-methylcytidine-3'-phosphorothioate
  modified_base 23: mod_base = OTHER; note = 2'-O-methyladenosine
aagcagcgagagcgcagggttca

SEQ ID NO: 498 - RNA, 23 nt, synthetic construct
  source 1..23: mol_type = other RNA
  modified_base 1: mod_base = OTHER; note = 2'-O-methyladenosine-3'-phosphorothioate
  modified_base 2: mod_base = OTHER; note = 2'-deoxy-2'-fluorouridine-3'-phosphorothioate
  modified_base 3: mod_base = OTHER; note = 2'-O-methyladenosine-3'-phosphate
  modified_base 4: mod_base = OTHER; note = 2'-O-methylguanosine-3'-phosphate
  modified_base 5: mod_base = OTHER; note = 2'-O-methylguanosine-3'-phosphate
  modified_base 6: mod_base = OTHER; note = 2'-deoxy-2'-fluorouridine-3'-phosphate
  modified_base 7: mod_base = OTHER; note = 2'-O-methylguanosine-3'-phosphate
  modified_base 8: mod_base = OTHER; note = 2'-deoxy-2'-fluorouridine-3'-phosphate
  modified_base 9: mod_base = OTHER; note = 2'-deoxy-2'-fluorouridine-3'-phosphate
  modified_base 10: mod_base = OTHER; note = 2'-O-methylcytidine-3'-phosphate
  modified_base 11: mod_base = OTHER; note = 2'-O-methylcytidine-3'-phosphate
  modified_base 12: mod_base = OTHER; note = 2'-O-methyladenosine-3'-phosphate
  modified_base 13: mod_base = OTHER; note = 2'-O-methylcytidine-3'-phosphate
  modified_base 14: mod_base = OTHER; note = 2'-deoxy-2'-fluoroadenosine-3'-phosphate
  modified_base 15: mod_base = OTHER; note = 2'-O-methylcytidine-3'-phosphate
  modified_base 16: mod_base = OTHER; note = 2'-deoxy-2'-fluorocytidine-3'-phosphate
  modified_base 17: mod_base = OTHER; note = 2'-O-methylcytidine-3'-phosphate
  modified_base 18: mod_base = OTHER; note = 2'-O-methyladenosine-3'-phosphate
  modified_base 19: mod_base = OTHER; note = 2'-O-methylguanosine-3'-phosphate
  modified_base 20: mod_base = OTHER; note = 2'-O-methylguanosine-3'-phosphate
  modified_base 21: mod_base = OTHER; note = 2'-O-methylguanosine-3'-phosphorothioate
  modified_base 22: mod_base = OTHER; note = 2'-O-methylcytidine-3'-phosphorothioate
  modified_base 23: mod_base = OTHER; note = 2'-O-methylcytidine
ataggtgttccacacccagggcc

SEQ ID NO: 499 - RNA, 23 nt, synthetic construct
  source 1..23: mol_type = other RNA
  modified_base 1: mod_base = OTHER; note = 2'-O-methyladenosine-3'-phosphorothioate
  modified_base 2: mod_base = OTHER; note = 2'-deoxy-2'-fluorocytidine-3'-phosphorothioate
  modified_base 3: mod_base = OTHER; note = 2'-O-methylcytidine-3'-phosphate
  modified_base 4: mod_base = OTHER; note = 2'-O-methyluridine-3'-phosphate
  modified_base 5: mod_base = OTHER; note = 2'-O-methylguanosine-3'-phosphate
  modified_base 6: mod_base = OTHER; note = 2'-deoxy-2'-fluoroguanosine-3'-phosphate
  modified_base 7: mod_base = OTHER; note = 2'-O-methyluridine-3'-phosphate
  modified_base 8: mod_base = OTHER; note = 2'-deoxy-2'-fluoroadenosine-3'-phosphate
  modified_base 9: mod_base = OTHER; note = 2'-deoxy-2'-fluoroguanosine-3'-phosphate
  modified_base 10: mod_base = OTHER; note = 2'-O-methylguanosine-3'-phosphate
  modified_base 11: mod_base = OTHER; note = 2'-O-methyluridine-3'-phosphate
  modified_base 12: mod_base = OTHER; note = 2'-O-methylguanosine-3'-phosphate
  modified_base 13: mod_base = OTHER; note = 2'-O-methyluridine-3'-phosphate
  modified_base 14: mod_base = OTHER; note = 2'-deoxy-2'-fluorouridine-3'-phosphate
  modified_base 15: mod_base = OTHER; note = 2'-O-methylcytidine-3'-phosphate
  modified_base 16: mod_base = OTHER; note = 2'-deoxy-2'-fluorocytidine-3'-phosphate
  modified_base 17: mod_base = OTHER; note = 2'-O-methyladenosine-3'-phosphate
  modified_base 18: mod_base = OTHER; note = 2'-O-methylcytidine-3'-phosphate
  modified_base 19: mod_base = OTHER; note = 2'-O-methyladenosine-3'-phosphate
  modified_base 20: mod_base = OTHER; note = 2'-O-methylcytidine-3'-phosphate
  modified_base 21: mod_base = OTHER; note = 2'-O-methylcytidine-3'-phosphorothioate
  modified_base 22: mod_base = OTHER; note = 2'-O-methylcytidine-3'-phosphorothioate
  modified_base 23: mod_base = OTHER; note = 2'-O-methyladenosine
acctggtaggtgttccacaccca

SEQ ID NO: 500 - RNA, 23 nt, synthetic construct
  source 1..23: mol_type = other RNA
  modified_base 1: mod_base = OTHER; note = 2'-O-methyladenosine-3'-phosphorothioate
  modified_base 2: mod_base = OTHER; note = 2'-deoxy-2'-fluorouridine-3'-phosphorothioate
  modified_base 3: mod_base = OTHER; note = 2'-O-methyluridine-3'-phosphate
  modified_base 4: mod_base = OTHER; note = 2'-O-methyluridine-3'-phosphate
  modified_base 5: mod_base = OTHER; note = 2'-O-methyladenosine-3'-phosphate
  modified_base 6: mod_base = OTHER; note = 2'-deoxy-2'-fluoroguanosine-3'-phosphate
  modified_base 7: mod_base = OTHER; note = 2'-O-methyladenosine-3'-phosphate
  modified_base 8: mod_base = OTHER; note = 2'-deoxy-2'-fluorocytidine-3'-phosphate
  modified_base 9: mod_base = OTHER; note = 2'-deoxy-2'-fluoroadenosine-3'-phosphate
  modified_base 10: mod_base = OTHER; note = 2'-O-methylguanosine-3'-phosphate
  modified_base 11: mod_base = OTHER; note = 2'-O-methylguanosine-3'-phosphate
  modified_base 12: mod_base = OTHER; note = 2'-O-methylcytidine-3'-phosphate
  modified_base 13: mod_base = OTHER; note = 2'-O-methylcytidine-3'-phosphate
  modified_base 14: mod_base = OTHER; note = 2'-deoxy-2'-fluorouridine-3'-phosphate
  modified_base 15: mod_base = OTHER; note = 2'-O-methylguanosine-3'-phosphate
  modified_base 16: mod_base = OTHER; note = 2'-deoxy-2'-fluoroguanosine-3'-phosphate
  modified_base 17: mod_base = OTHER; note = 2'-O-methyluridine-3'-phosphate
  modified_base 18: mod_base = OTHER; note = 2'-O-methyladenosine-3'-phosphate
  modified_base 19: mod_base = OTHER; note = 2'-O-methylguanosine-3'-phosphate
  modified_base 20: mod_base = OTHER; note = 2'-O-methylguanosine-3'-phosphate
  modified_base 21: mod_base = OTHER; note = 2'-O-methyluridine-3'-phosphorothioate
  modified_base 22: mod_base = OTHER; note = 2'-O-methylguanosine-3'-phosphorothioate
  modified_base 23: mod_base = OTHER; note = 2'-O-methyluridine
atttagacaggcctggtaggtgt

SEQ ID NO: 501 - RNA, 23 nt, synthetic construct
  source 1..23: mol_type = other RNA
  modified_base 1: mod_base = OTHER; note = 2'-O-methyladenosine-3'-phosphorothioate
  modified_base 2: mod_base = OTHER; note = 2'-deoxy-2'-fluoroadenosine-3'-phosphorothioate
  modified_base 3: mod_base = OTHER; note = 2'-O-methyladenosine-3'-phosphate
  modified_base 4: mod_base = OTHER; note = 2'-O-methyluridine-3'-phosphate
  modified_base 5: mod_base = OTHER; note = 2'-O-methylguanosine-3'-phosphate
  modified_base 6: mod_base = OTHER; note = 2'-deoxy-2'-fluorouridine-3'-phosphate
  modified_base 7: mod_base = OTHER; note = 2'-O-methylguanosine-3'-phosphate
  modified_base 8: mod_base = OTHER; note = 2'-deoxy-2'-fluorouridine-3'-phosphate
  modified_base 9: mod_base = OTHER; note = 2'-deoxy-2'-fluorocytidine-3'-phosphate
  modified_base 10: mod_base = OTHER; note = 2'-O-methylcytidine-3'-phosphate
  modified_base 11: mod_base = OTHER; note = 2'-O-methyluridine-3'-phosphate
  modified_base 12: mod_base = OTHER; note = 2'-O-methyluridine-3'-phosphate
  modified_base 13: mod_base = OTHER; note = 2'-O-methyluridine-3'-phosphate
  modified_base 14: mod_base = OTHER; note = 2'-deoxy-2'-fluoroadenosine-3'-phosphate
  modified_base 15: mod_base = OTHER; note = 2'-O-methylguanosine-3'-phosphate
  modified_base 16: mod_base = OTHER; note = 2'-deoxy-2'-fluoroadenosine-3'-phosphate
  modified_base 17: mod_base = OTHER; note = 2'-O-methylcytidine-3'-phosphate
  modified_base 18: mod_base = OTHER; note = 2'-O-methyladenosine-3'-phosphate
  modified_base 19: mod_base = OTHER; note = 2'-O-methylguanosine-3'-phosphate
  modified_base 20: mod_base = OTHER; note = 2'-O-methylguanosine-3'-phosphate
  modified_base 21: mod_base = OTHER; note = 2'-O-methylcytidine-3'-phosphorothioate
  modified_base 22: mod_base = OTHER; note = 2'-O-methylcytidine-3'-phosphorothioate
  modified_base 23: mod_base = OTHER; note = 2'-O-methyluridine
aaatgtgtcctttagacaggcct

SEQ ID NO: 502 - RNA, 23 nt, synthetic construct
  source 1..23: mol_type = other RNA
  modified_base 1: mod_base = OTHER; note = 2'-O-methyladenosine-3'-phosphorothioate
  modified_base 2: mod_base = OTHER; note = 2'-deoxy-2'-fluoroguanosine-3'-phosphorothioate
  modified_base 3: mod_base = OTHER; note = 2'-O-methylcytidine-3'-phosphate
  modified_base 4: mod_base = OTHER; note = 2'-O-methyluridine-3'-phosphate
  modified_base 5: mod_base = OTHER; note = 2'-O-methylcytidine-3'-phosphate
  modified_base 6: mod_base = OTHER; note = 2'-deoxy-2'-fluoroguanosine-3'-phosphate
  modified_base 7: mod_base = OTHER; note = 2'-O-methyladenosine-3'-phosphate
  modified_base 8: mod_base = OTHER; note = 2'-deoxy-2'-fluoroadenosine-3'-phosphate
  modified_base 9: mod_base = OTHER; note = 2'-deoxy-2'-fluorouridine-3'-phosphate
  modified_base 10: mod_base = OTHER; note = 2'-O-methylguanosine-3'-phosphate
  modified_base 11: mod_base = OTHER; note = 2'-O-methyluridine-3'-phosphate
  modified_base 12: mod_base = OTHER; note = 2'-O-methylguanosine-3'-phosphate
  modified_base 13: mod_base = OTHER; note = 2'-O-methyluridine-3'-phosphate
  modified_base 14: mod_base = OTHER; note = 2'-deoxy-2'-fluorocytidine-3'-phosphate
  modified_base 15: mod_base = OTHER; note = 2'-O-methylcytidine-3'-phosphate
  modified_base 16: mod_base = OTHER; note = 2'-deoxy-2'-fluorouridine-3'-phosphate
  modified_base 17: mod_base = OTHER; note = 2'-O-methyluridine-3'-phosphate
  modified_base 18: mod_base = OTHER; note = 2'-O-methyluridine-3'-phosphate
  modified_base 19: mod_base = OTHER; note = 2'-O-methyladenosine-3'-phosphate
  modified_base 20: mod_base = OTHER; note = 2'-O-methylguanosine-3'-phosphate
  modified_base 21: mod_base = OTHER; note = 2'-O-methyladenosine-3'-phosphorothioate
  modified_base 22: mod_base = OTHER; note = 2'-O-methylcytidine-3'-phosphorothioate
  modified_base 23: mod_base = OTHER; note = 2'-O-methyladenosine
agctcgaatgtgtcctttagaca

SEQ ID NO: 503 - RNA, 23 nt, synthetic construct
  source 1..23: mol_type = other RNA
  modified_base 1: mod_base = OTHER; note = 2'-O-methyladenosine-3'-phosphorothioate
  modified_base 2: mod_base = OTHER; note = 2'-deoxy-2'-fluorocytidine-3'-phosphorothioate
  modified_base 3: mod_base = OTHER; note = 2'-O-methylcytidine-3'-phosphate
  modified_base 4: mod_base = OTHER; note = 2'-O-methyladenosine-3'-phosphate
  modified_base 5: mod_base = OTHER; note = 2'-O-methylguanosine-3'-phosphate
  modified_base 6: mod_base = OTHER; note = 2'-deoxy-2'-fluorocytidine-3'-phosphate
  modified_base 7: mod_base = OTHER; note = 2'-O-methylcytidine-3'-phosphate
  modified_base 8: mod_base = OTHER; note = 2'-deoxy-2'-fluoroguanosine-3'-phosphate
  modified_base 9: mod_base = OTHER; note = 2'-deoxy-2'-fluorocytidine-3'-phosphate
  modified_base 10: mod_base = OTHER; note = 2'-O-methyluridine-3'-phosphate
  modified_base 11: mod_base = OTHER; note = 2'-O-methylcytidine-3'-phosphate
  modified_base 12: mod_base = OTHER; note = 2'-O-methylguanosine-3'-phosphate
  modified_base 13: mod_base = OTHER; note = 2'-O-methyladenosine-3'-phosphate
  modified_base 14: mod_base = OTHER; note = 2'-deoxy-2'-fluoroadenosine-3'-phosphate
  modified_base 15: mod_base = OTHER; note = 2'-O-methyluridine-3'-phosphate
  modified_base 16: mod_base = OTHER; note = 2'-deoxy-2'-fluoroguanosine-3'-phosphate
  modified_base 17: mod_base = OTHER; note = 2'-O-methyluridine-3'-phosphate
  modified_base 18: mod_base = OTHER; note = 2'-O-methylguanosine-3'-phosphate
  modified_base 19: mod_base = OTHER; note = 2'-O-methyluridine-3'-phosphate
  modified_base 20: mod_base = OTHER; note = 2'-O-methylcytidine-3'-phosphate
  modified_base 21: mod_base = OTHER; note = 2'-O-methylcytidine-3'-phosphorothioate
  modified_base 22: mod_base = OTHER; note = 2'-O-methyluridine-3'-phosphorothioate
  modified_base 23: mod_base = OTHER; note = 2'-O-methyluridine
accagccgctcgaatgtgtcctt

SEQ ID NO: 504 - RNA, 23 nt, synthetic construct
  source 1..23: mol_type = other RNA
  modified_base 1: mod_base = OTHER; note = 2'-O-methyladenosine-3'-phosphorothioate
  modified_base 2: mod_base = OTHER; note = 2'-deoxy-2'-fluorocytidine-3'-phosphorothioate
  modified_base 3: mod_base = OTHER; note = 2'-O-methylcytidine-3'-phosphate
  modified_base 4: mod_base = OTHER; note = 2'-O-methyladenosine-3'-phosphate
  modified_base 5: mod_base = OTHER; note = 2'-O-methylguanosine-3'-phosphate
  modified_base 6: mod_base = OTHER; note = 2'-deoxy-2'-fluorocytidine-3'-phosphate
  modified_base 7: mod_base = OTHER; note = 2'-O-methyluridine-3'-phosphate
  modified_base 8: mod_base = OTHER; note = 2'-deoxy-2'-fluorouridine-3'-phosphate
  modified_base 9: mod_base = OTHER; note = 2'-deoxy-2'-fluorocytidine-3'-phosphate
  modified_base 10: mod_base = OTHER; note = 2'-O-methyladenosine-3'-phosphate
  modified_base 11: mod_base = OTHER; note = 2'-O-methylcytidine-3'-phosphate
  modified_base 12: mod_base = OTHER; note = 2'-O-methyluridine-3'-phosphate
  modified_base 13: mod_base = OTHER; note = 2'-O-methylcytidine-3'-phosphate
  modified_base 14: mod_base = OTHER; note = 2'-deoxy-2'-fluorocytidine-3'-phosphate
  modified_base 15: mod_base = OTHER; note = 2'-O-methylguanosine-3'-phosphate
  modified_base 16: mod_base = OTHER; note = 2'-deoxy-2'-fluoroadenosine-3'-phosphate
  modified_base 17: mod_base = OTHER; note = 2'-O-methyladenosine-3'-phosphate
  modified_base 18: mod_base = OTHER; note = 2'-O-methylguanosine-3'-phosphate
  modified_base 19: mod_base = OTHER; note = 2'-O-methylguanosine-3'-phosphate
  modified_base 20: mod_base = OTHER; note = 2'-O-methylcytidine-3'-phosphate
  modified_base 21: mod_base = OTHER; note = 2'-O-methylcytidine-3'-phosphorothioate
  modified_base 22: mod_base = OTHER; note = 2'-O-methyladenosine-3'-phosphorothioate
  modified_base 23: mod_base = OTHER; note = 2'-O-methylguanosine
accagcttcactccgaaggccag

SEQ ID NO: 505 - RNA, 23 nt, synthetic construct
  source 1..23: mol_type = other RNA
  modified_base 1: mod_base = OTHER; note = 2'-O-methyladenosine-3'-phosphorothioate
  modified_base 2: mod_base = OTHER; note = 2'-deoxy-2'-fluorocytidine-3'-phosphorothioate
  modified_base 3: mod_base = OTHER; note = 2'-O-methyluridine-3'-phosphate
  modified_base 4: mod_base = OTHER; note = 2'-O-methylcytidine-3'-phosphate
  modified_base 5: mod_base = OTHER; note = 2'-O-methylguanosine-3'-phosphate
  modified_base 6: mod_base = OTHER; note = 2'-deoxy-2'-fluorouridine-3'-phosphate
  modified_base 7: mod_base = OTHER; note = 2'-O-methyladenosine-3'-phosphate
  modified_base 8: mod_base = OTHER; note = 2'-deoxy-2'-fluorocytidine-3'-phosphate
  modified_base 9: mod_base = OTHER; note = 2'-deoxy-2'-fluorocytidine-3'-phosphate
  modified_base 10: mod_base = OTHER; note = 2'-O-methyladenosine-3'-phosphate
  modified_base 11: mod_base = OTHER; note = 2'-O-methylguanosine-3'-phosphate
  modified_base 12: mod_base = OTHER; note = 2'-O-methylcytidine-3'-phosphate
  modified_base 13: mod_base = OTHER; note = 2'-O-methyluridine-3'-phosphate
  modified_base 14: mod_base = OTHER; note = 2'-deoxy-2'-fluorouridine-3'-phosphate
  modified_base 15: mod_base = OTHER; note = 2'-O-methylcytidine-3'-phosphate
  modified_base 16: mod_base = OTHER; note = 2'-deoxy-2'-fluoroadenosine-3'-phosphate
  modified_base 17: mod_base = OTHER; note = 2'-O-methylcytidine-3'-phosphate
  modified_base 18: mod_base = OTHER; note = 2'-O-methyluridine-3'-phosphate
  modified_base 19: mod_base = OTHER; note = 2'-O-methylcytidine-3'-phosphate
  modified_base 20: mod_base = OTHER; note = 2'-O-methylcytidine-3'-phosphate
  modified_base 21: mod_base = OTHER; note = 2'-O-methylguanosine-3'-phosphorothioate
  modified_base 22: mod_base = OTHER; note = 2'-O-methyladenosine-3'-phosphorothioate
  modified_base 23: mod_base = OTHER; note = 2'-O-methyladenosine
actcgtaccagcttcactccgaa

SEQ ID NO: 506 - RNA, 23 nt, synthetic construct
  source 1..23: mol_type = other RNA
  modified_base 1: mod_base = OTHER; note = 2'-O-methyladenosine-3'-phosphorothioate
  modified_base 2: mod_base = OTHER; note = 2'-deoxy-2'-fluorouridine-3'-phosphorothioate
  modified_base 3: mod_base = OTHER; note = 2'-O-methylguanosine-3'-phosphate
  modified_base 4: mod_base = OTHER; note = 2'-O-methylcytidine-3'-phosphate
  modified_base 5: mod_base = OTHER; note = 2'-O-methyladenosine-3'-phosphate
  modified_base 6: mod_base = OTHER; note = 2'-deoxy-2'-fluorocytidine-3'-phosphate
  modified_base 7: mod_base = OTHER; note = 2'-O-methylcytidine-3'-phosphate
  modified_base 8: mod_base = OTHER; note = 2'-deoxy-2'-fluorouridine-3'-phosphate
  modified_base 9: mod_base = OTHER; note = 2'-deoxy-2'-fluorocytidine-3'-phosphate
  modified_base 10: mod_base = OTHER; note = 2'-O-methylguanosine-3'-phosphate
  modified_base 11: mod_base = OTHER; note = 2'-O-methyluridine-3'-phosphate
  modified_base 12: mod_base = OTHER; note = 2'-O-methyladenosine-3'-phosphate
  modified_base 13: mod_base = OTHER; note = 2'-O-methylcytidine-3'-phosphate
  modified_base 14: mod_base = OTHER; note = 2'-deoxy-2'-fluorocytidine-3'-phosphate
  modified_base 15: mod_base = OTHER; note = 2'-O-methyladenosine-3'-phosphate
  modified_base 16: mod_base = OTHER; note = 2'-deoxy-2'-fluoroguanosine-3'-phosphate
  modified_base 17: mod_base = OTHER; note = 2'-O-methylcytidine-3'-phosphate
  modified_base 18: mod_base = OTHER; note = 2'-O-methyluridine-3'-phosphate
  modified_base 19: mod_base = OTHER; note = 2'-O-methyluridine-3'-phosphate
  modified_base 20: mod_base = OTHER; note = 2'-O-methylcytidine-3'-phosphate
  modified_base 21: mod_base = OTHER; note = 2'-O-methyladenosine-3'-phosphorothioate
  modified_base 22: mod_base = OTHER; note = 2'-O-methylcytidine-3'-phosphorothioate
  modified_base 23: mod_base = OTHER; note = 2'-O-methyluridine
atgcacctcgtaccagcttcact

SEQ ID NO: 507 - RNA, 23 nt, synthetic construct
  source 1..23: mol_type = other RNA
  modified_base 1: mod_base = OTHER; note = 2'-O-methyladenosine-3'-phosphorothioate
  modified_base 2: mod_base = OTHER; note = 2'-deoxy-2'-fluoroadenosine-3'-phosphorothioate
  modified_base 3: mod_base = OTHER; note = 2'-O-methylguanosine-3'-phosphate
  modified_base 4: mod_base = OTHER; note = 2'-O-methyladenosine-3'-phosphate
  modified_base 5: mod_base = OTHER; note = 2'-O-methyluridine-3'-phosphate
  modified_base 6: mod_base = OTHER; note = 2'-deoxy-2'-fluoroadenosine-3'-phosphate
  modified_base 7: mod_base = OTHER; note = 2'-O-methyluridine-3'-phosphate
  modified_base 8: mod_base = OTHER; note = 2'-deoxy-2'-fluoroguanosine-3'-phosphate
  modified_base 9: mod_base = OTHER; note = 2'-deoxy-2'-fluorocytidine-3'-phosphate
  modified_base 10: mod_base = OTHER; note = 2'-O-methyladenosine-3'-phosphate
  modified_base 11: mod_base = OTHER; note = 2'-O-methylcytidine-3'-phosphate
  modified_base 12: mod_base = OTHER; note = 2'-O-methylcytidine-3'-phosphate
  modified_base 13: mod_base = OTHER; note = 2'-O-methyluridine-3'-phosphate
  modified_base 14: mod_base = OTHER; note = 2'-deoxy-2'-fluorocytidine-3'-phosphate
  modified_base 15: mod_base = OTHER; note = 2'-O-methylguanosine-3'-phosphate
  modified_base 16: mod_base = OTHER; note = 2'-deoxy-2'-fluorouridine-3'-phosphate
  modified_base 17: mod_base = OTHER; note = 2'-O-methyladenosine-3'-phosphate
  modified_base 18: mod_base = OTHER; note = 2'-O-methylcytidine-3'-phosphate
  modified_base 19: mod_base = OTHER; note = 2'-O-methylcytidine-3'-phosphate
  modified_base 20: mod_base = OTHER; note = 2'-O-methyladenosine-3'-phosphate
  modified_base 21: mod_base = OTHER; note = 2'-O-methylguanosine-3'-phosphorothioate
  modified_base 22: mod_base = OTHER; note = 2'-O-methylcytidine-3'-phosphorothioate
  modified_base 23: mod_base = OTHER; note = 2'-O-methyluridine
aagatatgcacctcgtaccagct

SEQ ID NO: 508 - RNA, 23 nt, synthetic construct
  source 1..23: mol_type = other RNA
  modified_base 1: mod_base = OTHER; note = 2'-O-methyladenosine-3'-phosphorothioate
  modified_base 2: mod_base = OTHER; note = 2'-deoxy-2'-fluorocytidine-3'-phosphorothioate
  modified_base 3: mod_base = OTHER; note = 2'-O-methyluridine-3'-phosphate
  modified_base 4: mod_base = OTHER; note = 2'-O-methyluridine-3'-phosphate
  modified_base 5: mod_base = OTHER; note = 2'-O-methylguanosine-3'-phosphate
  modified_base 6: mod_base = OTHER; note = 2'-deoxy-2'-fluorouridine-3'-phosphate
  modified_base 7: mod_base = OTHER; note = 2'-O-methylcytidine-3'-phosphate
  modified_base 8: mod_base = OTHER; note = 2'-deoxy-2'-fluorocytidine-3'-phosphate
  modified_base 9: mod_base = OTHER; note = 2'-deoxy-2'-fluoroadenosine-3'-phosphate
  modified_base 10: mod_base = OTHER; note = 2'-O-methylguanosine-3'-phosphate
  modified_base 11: mod_base = OTHER; note = 2'-O-methyladenosine-3'-phosphate
  modified_base 12: mod_base = OTHER; note = 2'-O-methyluridine-3'-phosphate
  modified_base 13: mod_base = OTHER; note = 2'-O-methyladenosine-3'-phosphate
  modified_base 14: mod_base = OTHER; note = 2'-deoxy-2'-fluorouridine-3'-phosphate
  modified_base 15: mod_base = OTHER; note = 2'-O-methylguanosine-3'-phosphate
  modified_base 16: mod_base = OTHER; note = 2'-deoxy-2'-fluorocytidine-3'-phosphate
  modified_base 17: mod_base = OTHER; note = 2'-O-methyladenosine-3'-phosphate
  modified_base 18: mod_base = OTHER; note = 2'-O-methylcytidine-3'-phosphate
  modified_base 19: mod_base = OTHER; note = 2'-O-methylcytidine-3'-phosphate
  modified_base 20: mod_base = OTHER; note = 2'-O-methyluridine-3'-phosphate
  modified_base 21: mod_base = OTHER; note = 2'-O-methylcytidine-3'-phosphorothioate
  modified_base 22: mod_base = OTHER; note = 2'-O-methylguanosine-3'-phosphorothioate
  modified_base 23: mod_base = OTHER; note = 2'-O-methyluridine
acttgtccagatatgcacctcgt

SEQ ID NO: 509 - RNA, 23 nt, synthetic construct
  source 1..23: mol_type = other RNA
  modified_base 1: mod_base = OTHER; note = 2'-O-methyladenosine-3'-phosphorothioate
  modified_base 2: mod_base = OTHER; note = 2'-deoxy-2'-fluorouridine-3'-phosphorothioate
  modified_base 3: mod_base = OTHER; note = 2'-O-methylcytidine-3'-phosphate
  modified_base 4: mod_base = OTHER; note = 2'-O-methyluridine-3'-phosphate
  modified_base 5: mod_base = OTHER; note = 2'-O-methylcytidine-3'-phosphate
  modified_base 6: mod_base = OTHER; note = 2'-deoxy-2'-fluorouridine-3'-phosphate
  modified_base 7: mod_base = OTHER; note = 2'-O-methylcytidine-3'-phosphate
  modified_base 8: mod_base = OTHER; note = 2'-deoxy-2'-fluorocytidine-3'-phosphate
  modified_base 9: mod_base = OTHER; note = 2'-deoxy-2'-fluorouridine-3'-phosphate
  modified_base 10: mod_base = OTHER; note = 2'-O-methyluridine-3'-phosphate
  modified_base 11: mod_base = OTHER; note = 2'-O-methylguanosine-3'-phosphate
  modified_base 12: mod_base = OTHER; note = 2'-O-methyluridine-3'-phosphate
  modified_base 13: mod_base = OTHER; note = 2'-O-methylcytidine-3'-phosphate
  modified_base 14: mod_base = OTHER; note = 2'-deoxy-2'-fluorocytidine-3'-phosphate
  modified_base 15: mod_base = OTHER; note = 2'-O-methyladenosine-3'-phosphate
  modified_base 16: mod_base = OTHER; note = 2'-deoxy-2'-fluoroguanosine-3'-phosphate
  modified_base 17: mod_base = OTHER; note = 2'-O-methyladenosine-3'-phosphate
  modified_base 18: mod_base = OTHER; note = 2'-O-methyluridine-3'-phosphate
  modified_base 19: mod_base = OTHER; note = 2'-O-methyladenosine-3'-phosphate
  modified_base 20: mod_base = OTHER; note = 2'-O-methyluridine-3'-phosphate
  modified_base 21: mod_base = OTHER; note = 2'-O-methylguanosine-3'-phosphorothioate
  modified_base 22: mod_base = OTHER; note = 2'-O-methylcytidine-3'-phosphorothioate
  modified_base 23: mod_base = OTHER; note = 2'-O-methyladenosine
atctctccttgtccagatatgca

SEQ ID NO: 510 - RNA, 23 nt, synthetic construct
  source 1..23: mol_type = other RNA
  modified_base 1: mod_base = OTHER; note = 2'-O-methyladenosine-3'-phosphorothioate
  modified_base 2: mod_base = OTHER; note = 2'-deoxy-2'-fluoroadenosine-3'-phosphorothioate
  modified_base 3: mod_base = OTHER; note = 2'-O-methylcytidine-3'-phosphate
  modified_base 4: mod_base = OTHER; note = 2'-O-methylcytidine-3'-phosphate
  modified_base 5: mod_base = OTHER; note = 2'-O-methylguanosine-3'-phosphate
  modified_base 6: mod_base = OTHER; note = 2'-deoxy-2'-fluorocytidine-3'-phosphate
  modified_base 7: mod_base = OTHER; note = 2'-O-methyluridine-3'-phosphate
  modified_base 8: mod_base = OTHER; note = 2'-deoxy-2'-fluorocytidine-3'-phosphate
  modified_base 9: mod_base = OTHER; note = 2'-deoxy-2'-fluorouridine-3'-phosphate
  modified_base 10: mod_base = OTHER; note = 2'-O-methylcytidine-3'-phosphate
  modified_base 11: mod_base = OTHER; note = 2'-O-methyluridine-3'-phosphate
  modified_base 12: mod_base = OTHER; note = 2'-O-methylcytidine-3'-phosphate
  modified_base 13: mod_base = OTHER; note = 2'-O-methylcytidine-3'-phosphate
  modified_base 14: mod_base = OTHER; note = 2'-deoxy-2'-fluorouridine-3'-phosphate
  modified_base 15: mod_base = OTHER; note = 2'-O-methyluridine-3'-phosphate
  modified_base 16: mod_base = OTHER; note = 2'-deoxy-2'-fluoroguanosine-3'-phosphate
  modified_base 17: mod_base = OTHER; note = 2'-O-methyluridine-3'-phosphate
  modified_base 18: mod_base = OTHER; note = 2'-O-methylcytidine-3'-phosphate
  modified_base 19: mod_base = OTHER; note = 2'-O-methylcytidine-3'-phosphate
  modified_base 20: mod_base = OTHER; note = 2'-O-methyladenosine-3'-phosphate
  modified_base 21: mod_base = OTHER; note = 2'-O-methylguanosine-3'-phosphorothioate
  modified_base 22: mod_base = OTHER; note = 2'-O-methyladenosine-3'-phosphorothioate
  modified_base 23: mod_base = OTHER; note = 2'-O-methyluridine
aaccgctctctccttgtccagat

SEQ ID NO: 511 - RNA, 23 nt, synthetic construct
  source 1..23: mol_type = other RNA
  modified_base 1: mod_base = OTHER; note = 2'-O-methyladenosine-3'-phosphorothioate
  modified_base 2: mod_base = OTHER; note = 2'-deoxy-2'-fluorouridine-3'-phosphorothioate
  modified_base 3: mod_base = OTHER; note = 2'-O-methylcytidine-3'-phosphate
  modified_base 4: mod_base = OTHER; note = 2'-O-methylcytidine-3'-phosphate
  modified_base 5: mod_base = OTHER; note = 2'-O-methyladenosine-3'-phosphate
  modified_base 6: mod_base = OTHER; note = 2'-deoxy-2'-fluorouridine-3'-phosphate
  modified_base 7: mod_base = OTHER; note = 2'-O-methylcytidine-3'-phosphate
  modified_base 8: mod_base = OTHER; note = 2'-deoxy-2'-fluorocytidine-3'-phosphate
  modified_base 9: mod_base = OTHER; note = 2'-deoxy-2'-fluorocytidine-3'-phosphate
  modified_base 10: mod_base = OTHER; note = 2'-O-methyladenosine-3'-phosphate
  modified_base 11: mod_base = OTHER; note = 2'-O-methyluridine-3'-phosphate
  modified_base 12: mod_base = OTHER; note = 2'-O-methylguanosine-3'-phosphate
  modified_base 13: mod_base = OTHER; note = 2'-O-methylguanosine-3'-phosphate
  modified_base 14: mod_base = OTHER; note = 2'-deoxy-2'-fluoroadenosine-3'-phosphate
  modified_base 15: mod_base = OTHER; note = 2'-O-methylguanosine-3'-phosphate
  modified_base 16: mod_base = OTHER; note = 2'-deoxy-2'-fluorocytidine-3'-phosphate
  modified_base 17: mod_base = OTHER; note = 2'-O-methyluridine-3'-phosphate
  modified_base 18: mod_base = OTHER; note = 2'-O-methylguanosine-3'-phosphate
  modified_base 19: mod_base = OTHER; note = 2'-O-methylguanosine-3'-phosphate
  modified_base 20: mod_base = OTHER; note = 2'-O-methylguanosine-3'-phosphate
  modified_base 21: mod_base = OTHER; note = 2'-O-methylcytidine-3'-phosphorothioate
  modified_base 22: mod_base = OTHER; note = 2'-O-methylcytidine-3'-phosphorothioate
  modified_base 23: mod_base = OTHER; note = 2'-O-methyladenosine
atccatcccatggagctgggcca

SEQ ID NO: 512 - RNA, 23 nt, synthetic construct
  source 1..23: mol_type = other RNA
  modified_base 1: mod_base = OTHER; note = 2'-O-methyladenosine-3'-phosphorothioate
  modified_base 2: mod_base = OTHER; note = 2'-deoxy-2'-fluoroguanosine-3'-phosphorothioate
  modified_base 3: mod_base = OTHER; note = 2'-O-methylguanosine-3'-phosphate
  modified_base 4: mod_base = OTHER; note = 2'-O-methyluridine-3'-phosphate
  modified_base 5: mod_base = OTHER; note = 2'-O-methylcytidine-3'-phosphate
  modified_base 6: mod_base = OTHER; note = 2'-deoxy-2'-fluorouridine-3'-phosphate
  modified_base 7: mod_base = OTHER; note = 2'-O-methyluridine-3'-phosphate
  modified_base 8: mod_base = OTHER; note = 2'-deoxy-2'-fluorocytidine-3'-phosphate
  modified_base 9: mod_base = OTHER; note = 2'-deoxy-2'-fluorocytidine-3'-phosphate
  modified_base 10: mod_base = OTHER; note = 2'-O-methyladenosine-3'-phosphate
  modified_base 11: mod_base = OTHER; note = 2'-O-methyluridine-3'-phosphate
  modified_base 12: mod_base = OTHER; note = 2'-O-methylcytidine-3'-phosphate
  modified_base 13: mod_base = OTHER; note = 2'-O-methylcytidine-3'-phosphate
  modified_base 14: mod_base = OTHER; note = 2'-deoxy-2'-fluorocytidine-3'-phosphate
  modified_base 15: mod_base = OTHER; note = 2'-O-methyladenosine-3'-phosphate
  modified_base 16: mod_base = OTHER; note = 2'-deoxy-2'-fluorouridine-3'-phosphate
  modified_base 17: mod_base = OTHER; note = 2'-O-methylguanosine-3'-phosphate
  modified_base 18: mod_base = OTHER; note = 2'-O-methylguanosine-3'-phosphate
  modified_base 19: mod_base = OTHER; note = 2'-O-methyladenosine-3'-phosphate
  modified_base 20: mod_base = OTHER; note = 2'-O-methylguanosine-3'-phosphate
  modified_base 21: mod_base = OTHER; note = 2'-O-methylcytidine-3'-phosphorothioate
  modified_base 22: mod_base = OTHER; note = 2'-O-methyluridine-3'-phosphorothioate
  modified_base 23: mod_base = OTHER; note = 2'-O-methylguanosine
aggtcttccatcccatggagctg

SEQ ID NO: 513 - RNA, 23 nt, synthetic construct
  source 1..23: mol_type = other RNA
  modified_base 1: mod_base = OTHER; note = 2'-O-methyladenosine-3'-phosphorothioate
  modified_base 2: mod_base = OTHER; note = 2'-deoxy-2'-fluoroguanosine-3'-phosphorothioate
  modified_base 3: mod_base = OTHER; note = 2'-O-methylguanosine-3'-phosphate
  modified_base 4: mod_base = OTHER; note = 2'-O-methylcytidine-3'-phosphate
  modified_base 5: mod_base = OTHER; note = 2'-O-methylcytidine-3'-phosphate
  modified_base 6: mod_base = OTHER; note = 2'-deoxy-2'-fluorouridine-3'-phosphate
  modified_base 7: mod_base = OTHER; note = 2'-O-methylcytidine-3'-phosphate
  modified_base 8: mod_base = OTHER; note = 2'-deoxy-2'-fluoroadenosine-3'-phosphate
  modified_base 9: mod_base = OTHER; note = 2'-deoxy-2'-fluorouridine-3'-phosphate
  modified_base 10: mod_base = OTHER; note = 2'-O-methyladenosine-3'-phosphate
  modified_base 11: mod_base = OTHER; note = 2'-O-methylguanosine-3'-phosphate
  modified_base 12: mod_base = OTHER; note = 2'-O-methyluridine-3'-phosphate
  modified_base 13: mod_base = OTHER; note = 2'-O-methylcytidine-3'-phosphate
  modified_base 14: mod_base = OTHER; note = 2'-deoxy-2'-fluoroadenosine-3'-phosphate
  modified_base 15: mod_base = OTHER; note = 2'-O-methylguanosine-3'-phosphate
  modified_base 16: mod_base = OTHER; note = 2'-deoxy-2'-fluoroguanosine-3'-phosphate
  modified_base 17: mod_base = OTHER; note = 2'-O-methylcytidine-3'-phosphate
  modified_base 18: mod_base = OTHER; note = 2'-O-methyluridine-3'-phosphate
  modified_base 19: mod_base = OTHER; note = 2'-O-methylguanosine-3'-phosphate
  modified_base 20: mod_base = OTHER; note = 2'-O-methyladenosine-3'-phosphate
  modified_base 21: mod_base = OTHER; note = 2'-O-methylguanosine-3'-phosphorothioate
  modified_base 22: mod_base = OTHER; note = 2'-O-methyluridine-3'-phosphorothioate
  modified_base 23: mod_base = OTHER; note = 2'-O-methylguanosine
aggcctcatagtcaggctgagtg

SEQ ID NO: 514 - RNA, 23 nt, synthetic construct
  source 1..23: mol_type = other RNA
  modified_base 1: mod_base = OTHER; note = 2'-O-methyladenosine-3'-phosphorothioate
  modified_base 2: mod_base = OTHER; note = 2'-deoxy-2'-fluorouridine-3'-phosphorothioate
  modified_base 3: mod_base = OTHER; note = 2'-O-methylguanosine-3'-phosphate
  modified_base 4: mod_base = OTHER; note = 2'-O-methyladenosine-3'-phosphate
  modified_base 5: mod_base = OTHER; note = 2'-O-methylcytidine-3'-phosphate
  modified_base 6: mod_base = OTHER; note = 2'-deoxy-2'-fluorouridine-3'-phosphate
  modified_base 7: mod_base = OTHER; note = 2'-O-methylguanosine-3'-phosphate
  modified_base 8: mod_base = OTHER; note = 2'-deoxy-2'-fluoroguanosine-3'-phosphate
  modified_base 9: mod_base = OTHER; note = 2'-deoxy-2'-fluorouridine-3'-phosphate
  modified_base 10: mod_base = OTHER; note = 2'-O-methylguanosine-3'-phosphate
  modified_base 11: mod_base = OTHER; note = 2'-O-methylguanosine-3'-phosphate
  modified_base 12: mod_base = OTHER; note = 2'-O-methylcytidine-3'-phosphate
  modified_base 13: mod_base = OTHER; note = 2'-O-methylcytidine-3'-phosphate
  modified_base 14: mod_base = OTHER; note = 2'-deoxy-2'-fluorouridine-3'-phosphate
  modified_base 15: mod_base = OTHER; note = 2'-O-methylcytidine-3'-phosphate
  modified_base 16: mod_base = OTHER; note = 2'-deoxy-2'-fluoroadenosine-3'-phosphate
  modified_base 17: mod_base = OTHER; note = 2'-O-methyluridine-3'-phosphate
  modified_base 18: mod_base = OTHER; note = 2'-O-methyladenosine-3'-phosphate
  modified_base 19: mod_base = OTHER; note = 2'-O-methylguanosine-3'-phosphate
  modified_base 20: mod_base = OTHER; note = 2'-O-methyluridine-3'-phosphate
  modified_base 21: mod_base = OTHER; note = 2'-O-methylcytidine-3'-phosphorothioate
  modified_base 22: mod_base = OTHER; note = 2'-O-methyladenosine-3'-phosphorothioate
  modified_base 23: mod_base = OTHER; note = 2'-O-methylguanosine
atgactggtggcctcatagtcag

SEQ ID NO: 515 - RNA, 23 nt, synthetic construct
  source 1..23: mol_type = other RNA
  modified_base 1: mod_base = OTHER; note = 2'-O-methyladenosine-3'-phosphorothioate
  modified_base 2: mod_base = OTHER; note = 2'-deoxy-2'-fluorouridine-3'-phosphorothioate
  modified_base 3: mod_base = OTHER; note = 2'-O-methyladenosine-3'-phosphate
  modified_base 4: mod_base = OTHER; note = 2'-O-methyladenosine-3'-phosphate
  modified_base 5: mod_base = OTHER; note = 2'-O-methylcytidine-3'-phosphate
  modified_base 6: mod_base = OTHER; note = 2'-deoxy-2'-fluorouridine-3'-phosphate
  modified_base 7: mod_base = OTHER; note = 2'-O-methylcytidine-3'-phosphate
  modified_base 8: mod_base = OTHER; note = 2'-deoxy-2'-fluorouridine-3'-phosphate
  modified_base 9: mod_base = OTHER; note = 2'-deoxy-2'-fluoroguanosine-3'-phosphate
  modified_base 10: mod_base = OTHER; note = 2'-O-methyladenosine-3'-phosphate
  modified_base 11: mod_base = OTHER; note = 2'-O-methylcytidine-3'-phosphate
  modified_base 12: mod_base = OTHER; note = 2'-O-methyluridine-3'-phosphate
  modified_base 13: mod_base = OTHER; note = 2'-O-methylguanosine-3'-phosphate
  modified_base 14: mod_base = OTHER; note = 2'-deoxy-2'-fluoroguanosine-3'-phosphate
  modified_base 15: mod_base = OTHER; note = 2'-O-methyluridine-3'-phosphate
  modified_base 16: mod_base = OTHER; note = 2'-deoxy-2'-fluoroguanosine-3'-phosphate
  modified_base 17: mod_base = OTHER; note = 2'-O-methylguanosine-3'-phosphate
  modified_base 18: mod_base = OTHER; note = 2'-O-methylcytidine-3'-phosphate
  modified_base 19: mod_base = OTHER; note = 2'-O-methylcytidine-3'-phosphate
  modified_base 20: mod_base = OTHER; note = 2'-O-methyluridine-3'-phosphate
  modified_base 21: mod_base = OTHER; note = 2'-O-methylcytidine-3'-phosphorothioate
  modified_base 22: mod_base = OTHER; note = 2'-O-methyladenosine-3'-phosphorothioate
  modified_base 23: mod_base = OTHER; note = 2'-O-methyluridine
ataactctgactggtggcctcat

SEQ ID NO: 516 - RNA, 23 nt, synthetic construct
  source 1..23: mol_type = other RNA
  modified_base 1: mod_base = OTHER; note = 2'-O-methyladenosine-3'-phosphorothioate
  modified_base 2: mod_base = OTHER; note = 2'-deoxy-2'-fluorocytidine-3'-phosphorothioate
  modified_base 3: mod_base = OTHER; note = 2'-O-methylguanosine-3'-phosphate
  modified_base 4: mod_base = OTHER; note = 2'-O-methylguanosine-3'-phosphate
  modified_base 5: mod_base = OTHER; note = 2'-O-methylcytidine-3'-phosphate
  modified_base 6: mod_base = OTHER; note = 2'-deoxy-2'-fluorouridine-3'-phosphate
  modified_base 7: mod_base = OTHER; note = 2'-O-methylguanosine-3'-phosphate
  modified_base 8: mod_base = OTHER; note = 2'-deoxy-2'-fluorouridine-3'-phosphate
  modified_base 9: mod_base = OTHER; note = 2'-deoxy-2'-fluoroadenosine-3'-phosphate
  modified_base 10: mod_base = OTHER; note = 2'-O-methyladenosine-3'-phosphate
  modified_base 11: mod_base = OTHER; note = 2'-O-methylcytidine-3'-phosphate
  modified_base 12: mod_base = OTHER; note = 2'-O-methyluridine-3'-phosphate
  modified_base 13: mod_base = OTHER; note = 2'-O-methylcytidine-3'-phosphate
  modified_base 14: mod_base = OTHER; note = 2'-deoxy-2'-fluorouridine-3'-phosphate
  modified_base 15: mod_base = OTHER; note = 2'-O-methylguanosine-3'-phosphate
  modified_base 16: mod_base = OTHER; note = 2'-deoxy-2'-fluoroadenosine-3'-phosphate
  modified_base 17: mod_base = OTHER; note = 2'-O-methylcytidine-3'-phosphate
  modified_base 18: mod_base = OTHER; note = 2'-O-methyluridine-3'-phosphate
  modified_base 19: mod_base = OTHER; note = 2'-O-methylguanosine-3'-phosphate
  modified_base 20: mod_base = OTHER; note = 2'-O-methylguanosine-3'-phosphate
  modified_base 21: mod_base = OTHER; note = 2'-O-methyluridine-3'-phosphorothioate
  modified_base 22: mod_base = OTHER; note = 2'-O-methylguanosine-3'-phosphorothioate
  modified_base 23: mod_base = OTHER; note = 2'-O-methylguanosine
acggctgtaactctgactggtgg

SEQ ID NO: 517 - RNA, 23 nt, synthetic construct
  source 1..23: mol_type = other RNA
  modified_base 1: mod_base = OTHER; note = 2'-O-methyladenosine-3'-phosphorothioate
  modified_base 2: mod_base = OTHER; note = 2'-deoxy-2'-fluoroguanosine-3'-phosphorothioate
  modified_base 3: mod_base = OTHER; note = 2'-O-methylguanosine-3'-phosphate
  modified_base 4: mod_base = OTHER; note = 2'-O-methylcytidine-3'-phosphate
  modified_base 5: mod_base = OTHER; note = 2'-O-methyladenosine-3'-phosphate
  modified_base 6: mod_base = OTHER; note = 2'-deoxy-2'-fluoroguanosine-3'-phosphate
  modified_base 7: mod_base = OTHER; note = 2'-O-methylcytidine-3'-phosphate
  modified_base 8: mod_base = OTHER; note = 2'-deoxy-2'-fluoroguanosine-3'-phosphate
  modified_base 9: mod_base = OTHER; note = 2'-deoxy-2'-fluoroguanosine-3'-phosphate
  modified_base 10: mod_base = OTHER; note = 2'-O-methylcytidine-3'-phosphate
  modified_base 11: mod_base = OTHER; note = 2'-O-methyluridine-3'-phosphate
  modified_base 12: mod_base = OTHER; note = 2'-O-methylguanosine-3'-phosphate
  modified_base 13: mod_base = OTHER; note = 2'-O-methyluridine-3'-phosphate
  modified_base 14: mod_base = OTHER; note = 2'-deoxy-2'-fluoroadenosine-3'-phosphate
  modified_base 15: mod_base = OTHER; note = 2'-O-methyladenosine-3'-phosphate
  modified_base 16: mod_base = OTHER; note = 2'-deoxy-2'-fluorocytidine-3'-phosphate
  modified_base 17: mod_base = OTHER; note = 2'-O-methyluridine-3'-phosphate
  modified_base 18: mod_base = OTHER; note = 2'-O-methylcytidine-3'-phosphate
  modified_base 19: mod_base = OTHER; note = 2'-O-methyluridine-3'-phosphate
  modified_base 20: mod_base = OTHER; note = 2'-O-methylguanosine-3'-phosphate
  modified_base 21: mod_base = OTHER; note = 2'-O-methyladenosine-3'-phosphorothioate
  modified_base 22: mod_base = OTHER; note = 2'-O-methylcytidine-3'-phosphorothioate
  modified_base 23: mod_base = OTHER; note = 2'-O-methyluridine
aggcagcggctgtaactctgact

SEQ ID NO: 518 - RNA, 23 nt, synthetic construct
  source 1..23: mol_type = other RNA
  modified_base 1: mod_base = OTHER; note = 2'-O-methyladenosine-3'-phosphorothioate
  modified_base 2: mod_base = OTHER; note = 2'-deoxy-2'-fluorouridine-3'-phosphorothioate
  modified_base 3: mod_base = OTHER; note = 2'-O-methylcytidine-3'-phosphate
  modified_base 4: mod_base = OTHER; note = 2'-O-methyladenosine-3'-phosphate
  modified_base 5: mod_base = OTHER; note = 2'-O-methylguanosine-3'-phosphate
  modified_base 6: mod_base = OTHER; note = 2'-deoxy-2'-fluorouridine-3'-phosphate
  modified_base 7: mod_base = OTHER; note = 2'-O-methyluridine-3'-phosphate
  modified_base 8: mod_base = OTHER; note = 2'-deoxy-2'-fluorocytidine-3'-phosphate
  modified_base 9: mod_base = OTHER; note = 2'-deoxy-2'-fluorocytidine-3'-phosphate
  modified_base 10: mod_base = OTHER; note = 2'-O-methyladenosine-3'-phosphate
  modified_base 11: mod_base = OTHER; note = 2'-O-methylguanosine-3'-phosphate
  modified_base 12: mod_base = OTHER; note = 2'-O-methylguanosine-3'-phosphate
  modified_base 13: mod_base = OTHER; note = 2'-O-methylcytidine-3'-phosphate
  modified_base 14: mod_base = OTHER; note = 2'-deoxy-2'-fluoroadenosine-3'-phosphate
  modified_base 15: mod_base = OTHER; note = 2'-O-methylguanosine-3'-phosphate
  modified_base 16: mod_base = OTHER; note = 2'-deoxy-2'-fluorocytidine-3'-phosphate
  modified_base 17: mod_base = OTHER; note = 2'-O-methylguanosine-3'-phosphate
  modified_base 18: mod_base = OTHER; note = 2'-O-methylguanosine-3'-phosphate
  modified_base 19: mod_base = OTHER; note = 2'-O-methylcytidine-3'-phosphate
  modified_base 20: mod_base = OTHER; note = 2'-O-methyluridine-3'-phosphate
  modified_base 21: mod_base = OTHER; note = 2'-O-methylguanosine-3'-phosphorothioate
  modified_base 22: mod_base = OTHER; note = 2'-O-methyluridine-3'-phosphorothioate
  modified_base 23: mod_base = OTHER; note = 2'-O-methyladenosine
atcagttccaggcagcggctgta

SEQ ID NO: 519 - RNA, 23 nt, synthetic construct
  source 1..23: mol_type = other RNA
  modified_base 1: mod_base = OTHER; note = 2'-O-methyladenosine-3'-phosphorothioate
  modified_base 2: mod_base = OTHER; note = 2'-deoxy-2'-fluorocytidine-3'-phosphorothioate
  modified_base 3: mod_base = OTHER; note = 2'-O-methyladenosine-3'-phosphate
  modified_base 4: mod_base = OTHER; note = 2'-O-methylguanosine-3'-phosphate
  modified_base 5: mod_base = OTHER; note = 2'-O-methylcytidine-3'-phosphate
  modified_base 6: mod_base = OTHER; note = 2'-deoxy-2'-fluoroadenosine-3'-phosphate
  modified_base 7: mod_base = OTHER; note = 2'-O-methyluridine-3'-phosphate
  modified_base 8: mod_base = OTHER; note = 2'-deoxy-2'-fluorocytidine-3'-phosphate
  modified_base 9: mod_base = OTHER; note = 2'-deoxy-2'-fluoroadenosine-3'-phosphate
  modified_base 10: mod_base = OTHER; note = 2'-O-methylguanosine-3'-phosphate
  modified_base 11: mod_base = OTHER; note = 2'-O-methyluridine-3'-phosphate
  modified_base 12: mod_base = OTHER; note = 2'-O-methyluridine-3'-phosphate
  modified_base 13: mod_base = OTHER; note = 2'-O-methylcytidine-3'-phosphate
  modified_base 14: mod_base = OTHER; note = 2'-deoxy-2'-fluorocytidine-3'-phosphate
  modified_base 15: mod_base = OTHER; note = 2'-O-methyladenosine-3'-phosphate
  modified_base 16: mod_base = OTHER; note = 2'-deoxy-2'-fluoroguanosine-3'-phosphate
  modified_base 17: mod_base = OTHER; note = 2'-O-methylguanosine-3'-phosphate
  modified_base 18: mod_base = OTHER; note = 2'-O-methylcytidine-3'-phosphate
  modified_base 19: mod_base = OTHER; note = 2'-O-methyladenosine-3'-phosphate
  modified_base 20: mod_base = OTHER; note = 2'-O-methylguanosine-3'-phosphate
  modified_base 21: mod_base = OTHER; note = 2'-O-methylcytidine-3'-phosphorothioate
  modified_base 22: mod_base = OTHER; note = 2'-O-methylguanosine-3'-phosphorothioate
  modified_base 23: mod_base = OTHER; note = 2'-O-methylguanosine
acagcatcagttccaggcagcgg

SEQ ID NO: 520 - RNA, 23 nt, synthetic construct
  source 1..23: mol_type = other RNA
  modified_base 1: mod_base = OTHER; note = 2'-O-methyladenosine-3'-phosphorothioate
  modified_base 2: mod_base = OTHER; note = 2'-deoxy-2'-fluorocytidine-3'-phosphorothioate
  modified_base 3: mod_base = OTHER; note = 2'-O-methylguanosine-3'-phosphate
  modified_base 4: mod_base = OTHER; note = 2'-O-methyluridine-3'-phosphate
  modified_base 5: mod_base = OTHER; note = 2'-O-methylguanosine-3'-phosphate
  modified_base 6: mod_base = OTHER; note = 2'-deoxy-2'-fluorocytidine-3'-phosphate
  modified_base 7: mod_base = OTHER; note = 2'-O-methylguanosine-3'-phosphate
  modified_base 8: mod_base = OTHER; note = 2'-deoxy-2'-fluorouridine-3'-phosphate
  modified_base 9: mod_base = OTHER; note = 2'-deoxy-2'-fluorocytidine-3'-phosphate
  modified_base 10: mod_base = OTHER; note = 2'-O-methyladenosine-3'-phosphate
  modified_base 11: mod_base = OTHER; note = 2'-O-methylguanosine-3'-phosphate
  modified_base 12: mod_base = OTHER; note = 2'-O-methylcytidine-3'-phosphate
  modified_base 13: mod_base = OTHER; note = 2'-O-methyladenosine-3'-phosphate
  modified_base 14: mod_base = OTHER; note = 2'-deoxy-2'-fluorouridine-3'-phosphate
  modified_base 15: mod_base = OTHER; note = 2'-O-methylcytidine-3'-phosphate
  modified_base 16: mod_base = OTHER; note = 2'-deoxy-2'-fluoroadenosine-3'-phosphate
  modified_base 17: mod_base = OTHER; note = 2'-O-methylguanosine-3'-phosphate
  modified_base 18: mod_base = OTHER; note = 2'-O-methyluridine-3'-phosphate
  modified_base 19: mod_base = OTHER; note = 2'-O-methyluridine-3'-phosphate
  modified_base 20: mod_base = OTHER; note = 2'-O-methylcytidine-3'-phosphate
  modified_base 21: mod_base = OTHER; note = 2'-O-methylcytidine-3'-phosphorothioate
  modified_base 22: mod_base = OTHER; note = 2'-O-methyladenosine-3'-phosphorothioate
  modified_base 23: mod_base = OTHER; note = 2'-O-methylguanosine
acgtgcgtcagcatcagttccag

SEQ ID NO: 521 - RNA, 23 nt, synthetic construct
  source 1..23: mol_type = other RNA
  modified_base 1: mod_base = OTHER; note = 2'-O-methyladenosine-3'-phosphorothioate
  modified_base 2: mod_base = OTHER; note = 2'-deoxy-2'-fluoroguanosine-3'-phosphorothioate
  modified_base 3: mod_base = OTHER; note = 2'-O-methylguanosine-3'-phosphate
  modified_base 4: mod_base = OTHER; note = 2'-O-methylcytidine-3'-phosphate
  modified_base 5: mod_base = OTHER; note = 2'-O-methylcytidine-3'-phosphate
  modified_base 6: mod_base = OTHER; note = 2'-deoxy-2'-fluoroadenosine-3'-phosphate
  modified_base 7: mod_base = OTHER; note = 2'-O-methylcytidine-3'-phosphate
  modified_base 8: mod_base = OTHER; note = 2'-deoxy-2'-fluoroguanosine-3'-phosphate
  modified_base 9: mod_base = OTHER; note = 2'-deoxy-2'-fluorouridine-3'-phosphate
  modified_base 10: mod_base = OTHER; note = 2'-O-methylguanosine-3'-phosphate
  modified_base 11: mod_base = OTHER; note = 2'-O-methylcytidine-3'-phosphate
  modified_base 12: mod_base = OTHER; note = 2'-O-methylguanosine-3'-phosphate
  modified_base 13: mod_base = OTHER; note = 2'-O-methyluridine-3'-phosphate
  modified_base 14: mod_base = OTHER; note = 2'-deoxy-2'-fluorocytidine-3'-phosphate
  modified_base 15: mod_base = OTHER; note = 2'-O-methyladenosine-3'-phosphate
  modified_base 16: mod_base = OTHER; note = 2'-deoxy-2'-fluoroguanosine-3'-phosphate
  modified_base 17: mod_base = OTHER; note = 2'-O-methylcytidine-3'-phosphate
  modified_base 18: mod_base = OTHER; note = 2'-O-methyladenosine-3'-phosphate
  modified_base 19: mod_base = OTHER; note = 2'-O-methyluridine-3'-phosphate
  modified_base 20: mod_base = OTHER; note = 2'-O-methylcytidine-3'-phosphate
  modified_base 21: mod_base = OTHER; note = 2'-O-methyladenosine-3'-phosphorothioate
  modified_base 22: mod_base = OTHER; note = 2'-O-methylguanosine-3'-phosphorothioate
  modified_base 23: mod_base = OTHER; note = 2'-O-methyluridine
aggccacgtgcgtcagcatcagt

SEQ ID NO: 522 - RNA, 23 nt, synthetic construct
  source 1..23: mol_type = other RNA
  modified_base 1: mod_base = OTHER; note = 2'-O-methyladenosine-3'-phosphorothioate
  modified_base 2: mod_base = OTHER; note = 2'-deoxy-2'-fluorocytidine-3'-phosphorothioate
  modified_base 3: mod_base = OTHER; note = 2'-O-methylcytidine-3'-phosphate
  modified_base 4: mod_base = OTHER; note = 2'-O-methyladenosine-3'-phosphate
  modified_base 5: mod_base = OTHER; note = 2'-O-methylcytidine-3'-phosphate
  modified_base 6: mod_base = OTHER; note = 2'-deoxy-2'-fluorocytidine-3'-phosphate
  modified_base 7: mod_base = OTHER; note = 2'-O-methyladenosine-3'-phosphate
  modified_base 8: mod_base = OTHER; note = 2'-deoxy-2'-fluorouridine-3'-phosphate
  modified_base 9: mod_base = OTHER; note = 2'-deoxy-2'-fluoroguanosine-3'-phosphate
  modified_base 10: mod_base = OTHER; note = 2'-O-methyladenosine-3'-phosphate
  modified_base 11: mod_base = OTHER; note = 2'-O-methylguanosine-3'-phosphate
  modified_base 12: mod_base = OTHER; note = 2'-O-methylguanosine-3'-phosphate
  modified_base 13: mod_base = OTHER; note = 2'-O-methyluridine-3'-phosphate
  modified_base 14: mod_base = OTHER; note = 2'-deoxy-2'-fluoroguanosine-3'-phosphate
  modified_base 15: mod_base = OTHER; note = 2'-O-methylguanosine-3'-phosphate
  modified_base 16: mod_base = OTHER; note = 2'-deoxy-2'-fluorocytidine-3'-phosphate
  modified_base 17: mod_base = OTHER; note = 2'-O-methyladenosine-3'-phosphate
  modified_base 18: mod_base = OTHER; note = 2'-O-methylcytidine-3'-phosphate
  modified_base 19: mod_base = OTHER; note = 2'-O-methyladenosine-3'-phosphate
  modified_base 20: mod_base = OTHER; note = 2'-O-methyluridine-3'-phosphate
  modified_base 21: mod_base = OTHER; note = 2'-O-methylguanosine-3'-phosphorothioate
  modified_base 22: mod_base = OTHER; note = 2'-O-methylguanosine-3'-phosphorothioate
  modified_base 23: mod_base = OTHER; note = 2'-O-methylguanosine
accaccatgaggtggcacatggg

SEQ ID NO: 523 - RNA, 23 nt, synthetic construct
  source 1..23: mol_type = other RNA
  modified_base 1: mod_base = OTHER; note = 2'-O-methyladenosine-3'-phosphorothioate
  modified_base 2: mod_base = OTHER; note = 2'-deoxy-2'-fluorouridine-3'-phosphorothioate
  modified_base 3: mod_base = OTHER; note = 2'-O-methyluridine-3'-phosphate
  modified_base 4: mod_base = OTHER; note = 2'-O-methylguanosine-3'-phosphate
  modified_base 5: mod_base = OTHER; note = 2'-O-methyluridine-3'-phosphate
  modified_base 6: mod_base = OTHER; note = 2'-deoxy-2'-fluoroguanosine-3'-phosphate
  modified_base 7: mod_base = OTHER; note = 2'-O-methylguanosine-3'-phosphate
  modified_base 8: mod_base = OTHER; note = 2'-deoxy-2'-fluoroguanosine-3'-phosphate
  modified_base 9: mod_base = OTHER; note = 2'-deoxy-2'-fluoroadenosine-3'-phosphate
  modified_base 10: mod_base = OTHER; note = 2'-O-methyladenosine-3'-phosphate
  modified_base 11: mod_base = OTHER; note = 2'-O-methylguanosine-3'-phosphate
  modified_base 12: mod_base = OTHER; note = 2'-O-methylcytidine-3'-phosphate
  modified_base 13: mod_base = OTHER; note = 2'-O-methylcytidine-3'-phosphate
  modified_base 14: mod_base = OTHER; note = 2'-deoxy-2'-fluoroadenosine-3'-phosphate
  modified_base 15: mod_base = OTHER; note = 2'-O-methylcytidine-3'-phosphate
  modified_base 16: mod_base = OTHER; note = 2'-deoxy-2'-fluorocytidine-3'-phosphate
  modified_base 17: mod_base = OTHER; note = 2'-O-methyladenosine-3'-phosphate
  modified_base 18: mod_base = OTHER; note = 2'-O-methyluridine-3'-phosphate
  modified_base 19: mod_base = OTHER; note = 2'-O-methylguanosine-3'-phosphate
  modified_base 20: mod_base = OTHER; note = 2'-O-methyladenosine-3'-phosphate
  modified_base 21: mod_base = OTHER; note = 2'-O-methylguanosine-3'-phosphorothioate
  modified_base 22: mod_base = OTHER; note = 2'-O-methylguanosine-3'-phosphorothioate
  modified_base 23: mod_base = OTHER; note = 2'-O-methyluridine
attgtgggaagccaccatgaggt

SEQ ID NO: 524 - RNA, 23 nt, synthetic construct
  source 1..23: mol_type = other RNA
  modified_base 1: mod_base = OTHER; note = 2'-O-methyladenosine-3'-phosphorothioate
  modified_base 2: mod_base = OTHER; note = 2'-deoxy-2'-fluoroadenosine-3'-phosphorothioate
  modified_base 3: mod_base = OTHER; note = 2'-O-methyluridine-3'-phosphate
  modified_base 4: mod_base = OTHER; note = 2'-O-methyluridine-3'-phosphate
  modified_base 5: mod_base = OTHER; note = 2'-O-methylcytidine-3'-phosphate
  modified_base 6: mod_base = OTHER; note = 2'-deoxy-2'-fluorocytidine-3'-phosphate
  modified_base 7: mod_base = OTHER; note = 2'-O-methyluridine-3'-phosphate
  modified_base 8: mod_base = OTHER; note = 2'-deoxy-2'-fluorocytidine-3'-phosphate
  modified_base 9: mod_base = OTHER; note = 2'-deoxy-2'-fluoroadenosine-3'-phosphate
  modified_base 10: mod_base = OTHER; note = 2'-O-methyluridine-3'-phosphate
  modified_base 11: mod_base = OTHER; note = 2'-O-methyluridine-3'-phosphate
  modified_base 12: mod_base = OTHER; note = 2'-O-methylguanosine-3'-phosphate
  modified_base 13: mod_base = OTHER; note = 2'-O-methyluridine-3'-phosphate
  modified_base 14: mod_base = OTHER; note = 2'-deoxy-2'-fluoroguanosine-3'-phosphate
  modified_base 15: mod_base = OTHER; note = 2'-O-methylguanosine-3'-phosphate
  modified_base 16: mod_base = OTHER; note = 2'-deoxy-2'-fluoroguanosine-3'-phosphate
  modified_base 17: mod_base = OTHER; note = 2'-O-methyladenosine-3'-phosphate
  modified_base 18: mod_base = OTHER; note = 2'-O-methyladenosine-3'-phosphate
  modified_base 19: mod_base = OTHER; note = 2'-O-methylguanosine-3'-phosphate
  modified_base 20: mod_base = OTHER; note = 2'-O-methylcytidine-3'-phosphate
  modified_base 21: mod_base = OTHER; note = 2'-O-methylcytidine-3'-phosphorothioate
  modified_base 22: mod_base = OTHER; note = 2'-O-methyladenosine-3'-phosphorothioate
  modified_base 23: mod_base = OTHER; note = 2'-O-methylcytidine
aattcctcattgtgggaagccac

SEQ ID NO: 525 - RNA, 23 nt, synthetic construct
  source 1..23: mol_type = other RNA
  modified_base 1: mod_base = OTHER; note = 2'-O-methyladenosine-3'-phosphorothioate
  modified_base 2: mod_base = OTHER; note = 2'-deoxy-2'-fluoroadenosine-3'-phosphorothioate
  modified_base 3: mod_base = OTHER; note = 2'-O-methyladenosine-3'-phosphate
  modified_base 4: mod_base = OTHER; note = 2'-O-methylcytidine-3'-phosphate
  modified_base 5: mod_base = OTHER; note = 2'-O-methyladenosine-3'-phosphate
  modified_base 6: mod_base = OTHER; note = 2'-deoxy-2'-fluoroguanosine-3'-phosphate
  modified_base 7: mod_base = OTHER; note = 2'-O-methyladenosine-3'-phosphate
  modified_base 8: mod_base = OTHER; note = 2'-deoxy-2'-fluorouridine-3'-phosphate
  modified_base 9: mod_base = OTHER; note = 2'-deoxy-2'-fluorouridine-3'-phosphate
  modified_base 10: mod_base = OTHER; note = 2'-O-methylcytidine-3'-phosphate
  modified_base 11: mod_base = OTHER; note = 2'-O-methylcytidine-3'-phosphate
  modified_base 12: mod_base = OTHER; note = 2'-O-methyluridine-3'-phosphate
  modified_base 13: mod_base = OTHER; note = 2'-O-methylcytidine-3'-phosphate
  modified_base 14: mod_base = OTHER; note = 2'-deoxy-2'-fluoroadenosine-3'-phosphate
  modified_base 15: mod_base = OTHER; note = 2'-O-methyluridine-3'-phosphate
  modified_base 16: mod_base = OTHER; note = 2'-deoxy-2'-fluorouridine-3'-phosphate
  modified_base 17: mod_base = OTHER; note = 2'-O-methylguanosine-3'-phosphate
  modified_base 18: mod_base = OTHER; note = 2'-O-methyluridine-3'-phosphate
  modified_base 19: mod_base = OTHER; note = 2'-O-methylguanosine-3'-phosphate
  modified_base 20: mod_base = OTHER; note = 2'-O-methylguanosine-3'-phosphate
  modified_base 21: mod_base = OTHER; note = 2'-O-methylguanosine-3'-phosphorothioate
  modified_base 22: mod_base = OTHER; note = 2'-O-methyladenosine-3'-phosphorothioate
  modified_base 23: mod_base = OTHER; note = 2'-O-methyladenosine
aaacagattcctcattgtgggaa

SEQ ID NO: 526 - RNA, 23 nt, synthetic construct
  source 1..23: mol_type = other RNA
  modified_base 1: mod_base = OTHER; note = 2'-O-methyladenosine-3'-phosphorothioate
  modified_base 2: mod_base = OTHER; note = 2'-deoxy-2'-fluorouridine-3'-phosphorothioate
  modified_base 3: mod_base = OTHER; note = 2'-O-methylguanosine-3'-phosphate
  modified_base 4: mod_base = OTHER; note = 2'-O-methylguanosine-3'-phosphate
  modified_base 5: mod_base = OTHER; note = 2'-O-methylcytidine-3'-phosphate
  modified_base 6: mod_base = OTHER; note = 2'-deoxy-2'-fluoroguanosine-3'-phosphate
  modified_base 7: mod_base = OTHER; note = 2'-O-methyladenosine-3'-phosphate
  modified_base 8: mod_base = OTHER; note = 2'-deoxy-2'-fluoroadenosine-3'-phosphate
  modified_base 9: mod_base = OTHER; note = 2'-deoxy-2'-fluorocytidine-3'-phosphate
  modified_base 10: mod_base = OTHER; note = 2'-O-methyladenosine-3'-phosphate
  modified_base 11: mod_base = OTHER; note = 2'-O-methylguanosine-3'-phosphate
  modified_base 12: mod_base = OTHER; note = 2'-O-methyladenosine-3'-phosphate
  modified_base 13: mod_base = OTHER; note = 2'-O-methyluridine-3'-phosphate
  modified_base 14: mod_base = OTHER; note = 2'-deoxy-2'-fluorouridine-3'-phosphate
  modified_base 15: mod_base = OTHER; note = 2'-O-methylcytidine-3'-phosphate
  modified_base 16: mod_base = OTHER; note = 2'-deoxy-2'-fluorocytidine-3'-phosphate
  modified_base 17: mod_base = OTHER; note = 2'-O-methyluridine-3'-phosphate
  modified_base 18: mod_base = OTHER; note = 2'-O-methylcytidine-3'-phosphate
  modified_base 19: mod_base = OTHER; note = 2'-O-methyladenosine-3'-phosphate
  modified_base 20: mod_base = OTHER; note = 2'-O-methyluridine-3'-phosphate
  modified_base 21: mod_base = OTHER; note = 2'-O-methyluridine-3'-phosphorothioate
  modified_base 22: mod_base = OTHER; note = 2'-O-methylguanosine-3'-phosphorothioate
  modified_base 23: mod_base = OTHER; note = 2'-O-methyluridine
atggcgaacagattcctcattgt

SEQ ID NO: 527 - RNA, 23 nt, synthetic construct
  source 1..23: mol_type = other RNA
  modified_base 1: mod_base = OTHER; note = 2'-O-methyladenosine-3'-phosphorothioate
  modified_base 2: mod_base = OTHER; note = 2'-deoxy-2'-fluorouridine-3'-phosphorothioate
  modified_base 3: mod_base = OTHER; note = 2'-O-methyluridine-3'-phosphate
  modified_base 4: mod_base = OTHER; note = 2'-O-methylguanosine-3'-phosphate
  modified_base 5: mod_base = OTHER; note = 2'-O-methylguanosine-3'-phosphate
  modified_base 6: mod_base = OTHER; note = 2'-deoxy-2'-fluorouridine-3'-phosphate
  modified_base 7: mod_base = OTHER; note = 2'-O-methyluridine-3'-phosphate
  modified_base 8: mod_base = OTHER; note = 2'-deoxy-2'-fluoroguanosine-3'-phosphate
  modified_base 9: mod_base = OTHER; note = 2'-deoxy-2'-fluorocytidine-3'-phosphate
  modified_base 10: mod_base = OTHER; note = 2'-O-methylcytidine-3'-phosphate
  modified_base 11: mod_base = OTHER; note = 2'-O-methyluridine-3'-phosphate
  modified_base 12: mod_base = OTHER; note = 2'-O-methylguanosine-3'-phosphate
  modified_base 13: mod_base = OTHER; note = 2'-O-methylguanosine-3'-phosphate
  modified_base 14: mod_base = OTHER; note = 2'-deoxy-2'-fluorocytidine-3'-phosphate
  modified_base 15: mod_base = OTHER; note = 2'-O-methylguanosine-3'-phosphate
  modified_base 16: mod_base = OTHER; note = 2'-deoxy-2'-fluoroadenosine-3'-phosphate
  modified_base 17: mod_base = OTHER; note = 2'-O-methyladenosine-3'-phosphate
  modified_base 18: mod_base = OTHER; note = 2'-O-methylcytidine-3'-phosphate
  modified_base 19: mod_base = OTHER; note = 2'-O-methyladenosine-3'-phosphate
  modified_base 20: mod_base = OTHER; note = 2'-O-methylguanosine-3'-phosphate
  modified_base 21: mod_base = OTHER; note = 2'-O-methyladenosine-3'-phosphorothioate
  modified_base 22: mod_base = OTHER; note = 2'-O-methyluridine-3'-phosphorothioate
  modified_base 23: mod_base = OTHER; note = 2'-O-methyluridine
attggttgcctggcgaacagatt

SEQ ID NO: 528 - RNA, 23 nt, synthetic construct
  source 1..23: mol_type = other RNA
  modified_base 1: mod_base = OTHER; note = 2'-O-methyladenosine-3'-phosphorothioate
  modified_base 2: mod_base = OTHER; note = 2'-deoxy-2'-fluorouridine-3'-phosphorothioate
  modified_base 3: mod_base = OTHER; note = 2'-O-methylguanosine-3'-phosphate
  modified_base 4: mod_base = OTHER; note = 2'-O-methylcytidine-3'-phosphate
  modified_base 5: mod_base = OTHER; note = 2'-O-methylguanosine-3'-phosphate
  modified_base 6: mod_base = OTHER; note = 2'-deoxy-2'-fluorocytidine-3'-phosphate
  modified_base 7: mod_base = OTHER; note = 2'-O-methyluridine-3'-phosphate
  modified_base 8: mod_base = OTHER; note = 2'-deoxy-2'-fluorouridine-3'-phosphate
  modified_base 9: mod_base = OTHER; note = 2'-deoxy-2'-fluoroguanosine-3'-phosphate
  modified_base 10: mod_base = OTHER; note = 2'-O-methylguanosine-3'-phosphate
  modified_base 11: mod_base = OTHER; note = 2'-O-methyluridine-3'-phosphate
  modified_base 12: mod_base = OTHER; note = 2'-O-methyluridine-3'-phosphate
  modified_base 13: mod_base = OTHER; note = 2'-O-methylguanosine-3'-phosphate
  modified_base 14: mod_base = OTHER; note = 2'-deoxy-2'-fluorocytidine-3'-phosphate
  modified_base 15: mod_base = OTHER; note = 2'-O-methylcytidine-3'-phosphate
  modified_base 16: mod_base = OTHER; note = 2'-deoxy-2'-fluorouridine-3'-phosphate
  modified_base 17: mod_base = OTHER; note = 2'-O-methylguanosine-3'-phosphate
  modified_base 18: mod_base = OTHER; note = 2'-O-methylguanosine-3'-phosphate
  modified_base 19: mod_base = OTHER; note = 2'-O-methylcytidine-3'-phosphate
  modified_base 20: mod_base = OTHER; note = 2'-O-methylguanosine-3'-phosphate
  modified_base 21: mod_base = OTHER; note = 2'-O-methyladenosine-3'-phosphorothioate
  modified_base 22: mod_base = OTHER; note = 2'-O-methyladenosine-3'-phosphorothioate
  modified_base 23: mod_base = OTHER; note = 2'-O-methylcytidine
atgcgcttggttgcctggcgaac

SEQ ID NO: 529 - RNA, 23 nt, synthetic construct
  source 1..23: mol_type = other RNA
  modified_base 1: mod_base = OTHER; note = 2'-O-methyladenosine-3'-phosphorothioate
  modified_base 2: mod_base = OTHER; note = 2'-deoxy-2'-fluorouridine-3'-phosphorothioate
  modified_base 3: mod_base = OTHER; note = 2'-O-methylcytidine-3'-phosphate
  modified_base 4: mod_base = OTHER; note = 2'-O-methylcytidine-3'-phosphate
  modified_base 5: mod_base = OTHER; note = 2'-O-methylcytidine-3'-phosphate
  modified_base 6: mod_base = OTHER; note = 2'-deoxy-2'-fluoroadenosine-3'-phosphate
  modified_base 7: mod_base = OTHER; note = 2'-O-methylcytidine-3'-phosphate
  modified_base 8: mod_base = OTHER; note = 2'-deoxy-2'-fluoroadenosine-3'-phosphate
  modified_base 9: mod_base = OTHER; note = 2'-deoxy-2'-fluorouridine-3'-phosphate
  modified_base 10: mod_base = OTHER; note = 2'-O-methylguanosine-3'-phosphate
  modified_base 11: mod_base = OTHER; note = 2'-O-methylcytidine-3'-phosphate
  modified_base 12: mod_base = OTHER; note = 2'-O-methylguanosine-3'-phosphate
  modified_base 13: mod_base = OTHER; note = 2'-O-methylcytidine-3'-phosphate
  modified_base 14: mod_base = OTHER; note = 2'-deoxy-2'-fluorouridine-3'-phosphate
  modified_base 15: mod_base = OTHER; note = 2'-O-methyluridine-3'-phosphate
  modified_base 16: mod_base = OTHER; note = 2'-deoxy-2'-fluoroguanosine-3'-phosphate
  modified_base 17: mod_base = OTHER; note = 2'-O-methylguanosine-3'-phosphate
  modified_base 18: mod_base = OTHER; note = 2'-O-methyluridine-3'-phosphate
  modified_base 19: mod_base = OTHER; note = 2'-O-methyluridine-3'-phosphate
  modified_base 20: mod_base = OTHER; note = 2'-O-methylguanosine-3'-phosphate
  modified_base 21: mod_base = OTHER; note = 2'-O-methylcytidine-3'-phosphorothioate
  modified_base 22: mod_base = OTHER; note = 2'-O-methylcytidine-3'-phosphorothioate
  modified_base 23: mod_base = OTHER; note = 2'-O-methyluridine
atcccacatgcgcttggttgcct

SEQ ID NO: 530 - RNA, 23 nt, synthetic construct
  source 1..23: mol_type = other RNA
  modified_base 1: mod_base = OTHER; note = 2'-O-methyladenosine-3'-phosphorothioate
  modified_base 2: mod_base = OTHER; note = 2'-deoxy-2'-fluorocytidine-3'-phosphorothioate
  modified_base 3: mod_base = OTHER; note = 2'-O-methylcytidine-3'-phosphate
  modified_base 4: mod_base = OTHER; note = 2'-O-methyladenosine-3'-phosphate
  modified_base 5: mod_base = OTHER; note = 2'-O-methylguanosine-3'-phosphate
  modified_base 6: mod_base = OTHER; note = 2'-deoxy-2'-fluorocytidine-3'-phosphate
  modified_base 7: mod_base = OTHER; note = 2'-O-methyluridine-3'-phosphate
  modified_base 8: mod_base = OTHER; note = 2'-deoxy-2'-fluorocytidine-3'-phosphate
  modified_base 9: mod_base = OTHER; note = 2'-deoxy-2'-fluorocytidine-3'-phosphate
  modified_base 10: mod_base = OTHER; note = 2'-O-methylcytidine-3'-phosphate
  modified_base 11: mod_base = OTHER; note = 2'-O-methyladenosine-3'-phosphate
  modified_base 12: mod_base = OTHER; note = 2'-O-methylcytidine-3'-phosphate
  modified_base 13: mod_base = OTHER; note = 2'-O-methyladenosine-3'-phosphate
  modified_base 14: mod_base = OTHER; note = 2'-deoxy-2'-fluorouridine-3'-phosphate
  modified_base 15: mod_base = OTHER; note = 2'-O-methylguanosine-3'-phosphate
  modified_base 16: mod_base = OTHER; note = 2'-deoxy-2'-fluorocytidine-3'-phosphate
  modified_base 17: mod_base = OTHER; note = 2'-O-methylguanosine-3'-phosphate
  modified_base 18: mod_base = OTHER; note = 2'-O-methylcytidine-3'-phosphate
  modified_base 19: mod_base = OTHER; note = 2'-O-methyluridine-3'-phosphate
  modified_base 20: mod_base = OTHER; note = 2'-O-methyluridine-3'-phosphate
  modified_base 21: mod_base = OTHER; note = 2'-O-methylguanosine-3'-phosphorothioate
  modified_base 22: mod_base = OTHER; note = 2'-O-methylguanosine-3'-phosphorothioate
  modified_base 23: mod_base = OTHER; note = 2'-O-methyluridine
accagctcccacatgcgcttggt

SEQ ID NO: 531 - RNA, 23 nt, synthetic construct
  source 1..23: mol_type = other RNA
  modified_base 1: mod_base = OTHER; note = 2'-O-methyladenosine-3'-phosphorothioate
  modified_base 2: mod_base = OTHER; note = 2'-deoxy-2'-fluoroadenosine-3'-phosphorothioate
  modified_base 3: mod_base = OTHER; note = 2'-O-methyladenosine-3'-phosphate
  modified_base 4: mod_base = OTHER; note = 2'-O-methyluridine-3'-phosphate
  modified_base 5: mod_base = OTHER; note = 2'-O-methylguanosine-3'-phosphate
  modified_base 6: mod_base = OTHER; note = 2'-deoxy-2'-fluorocytidine-3'-phosphate
  modified_base 7: mod_base = OTHER; note = 2'-O-methylcytidine-3'-phosphate
  modified_base 8: mod_base = OTHER; note = 2'-deoxy-2'-fluorocytidine-3'-phosphate
  modified_base 9: mod_base = OTHER; note = 2'-deoxy-2'-fluoroadenosine-3'-phosphate
  modified_base 10: mod_base = OTHER; note = 2'-O-methylguanosine-3'-phosphate
  modified_base 11: mod_base = OTHER; note = 2'-O-methylcytidine-3'-phosphate
  modified_base 12: mod_base = OTHER; note = 2'-O-methyluridine-3'-phosphate
  modified_base 13: mod_base = OTHER; note = 2'-O-methylcytidine-3'-phosphate
  modified_base 14: mod_base = OTHER; note = 2'-deoxy-2'-fluorocytidine-3'-phosphate
  modified_base 15: mod_base = OTHER; note = 2'-O-methylcytidine-3'-phosphate
  modified_base 16: mod_base = OTHER; note = 2'-deoxy-2'-fluoroadenosine-3'-phosphate
  modified_base 17: mod_base = OTHER; note = 2'-O-methylcytidine-3'-phosphate
  modified_base 18: mod_base = OTHER; note = 2'-O-methyladenosine-3'-phosphate
  modified_base 19: mod_base = OTHER; note = 2'-O-methyluridine-3'-phosphate
  modified_base 20: mod_base = OTHER; note = 2'-O-methylguanosine-3'-phosphate
  modified_base 21: mod_base = OTHER; note = 2'-O-methylcytidine-3'-phosphorothioate
  modified_base 22: mod_base = OTHER; note = 2'-O-methylguanosine-3'-phosphorothioate
  modified_base 23: mod_base = OTHER; note = 2'-O-methylcytidine
aaatgcccagctcccacatgcgc

SEQ ID NO: 532 - RNA, 23 nt, synthetic construct
  source 1..23: mol_type = other RNA
  modified_base 1: mod_base = OTHER; note = 2'-O-methyladenosine-3'-phosphorothioate
  modified_base 2: mod_base = OTHER; note = 2'-deoxy-2'-fluoroadenosine-3'-phosphorothioate
  modified_base 3: mod_base = OTHER; note = 2'-O-methylguanosine-3'-phosphate
  modified_base 4: mod_base = OTHER; note = 2'-O-methyladenosine-3'-phosphate
  modified_base 5: mod_base = OTHER; note = 2'-O-methylguanosine-3'-phosphate
  modified_base 6: mod_base = OTHER; note = 2'-deoxy-2'-fluoroguanosine-3'-phosphate
  modified_base 7: mod_base = OTHER; note = 2'-O-methyladenosine-3'-phosphate
  modified_base 8: mod_base = OTHER; note = 2'-deoxy-2'-fluoroadenosine-3'-phosphate
  modified_base 9: mod_base = OTHER; note = 2'-deoxy-2'-fluorouridine-3'-phosphate
  modified_base 10: mod_base = OTHER; note = 2'-O-methylguanosine-3'-phosphate
  modified_base 11: mod_base = OTHER; note = 2'-O-methylcytidine-3'-phosphate
  modified_base 12: mod_base = OTHER; note = 2'-O-methylcytidine-3'-phosphate
  modified_base 13: mod_base = OTHER; note = 2'-O-methylcytidine-3'-phosphate
  modified_base 14: mod_base = OTHER; note = 2'-deoxy-2'-fluoroadenosine-3'-phosphate
  modified_base 15: mod_base = OTHER; note = 2'-O-methylguanosine-3'-phosphate
  modified_base 16: mod_base = OTHER; note = 2'-deoxy-2'-fluorocytidine-3'-phosphate
  modified_base 17: mod_base = OTHER; note = 2'-O-methyluridine-3'-phosphate
  modified_base 18: mod_base = OTHER; note = 2'-O-methylcytidine-3'-phosphate
  modified_base 19: mod_base = OTHER; note = 2'-O-methylcytidine-3'-phosphate
  modified_base 20: mod_base = OTHER; note = 2'-O-methylcytidine-3'-phosphate
  modified_base 21: mod_base = OTHER; note = 2'-O-methyladenosine-3'-phosphorothioate
  modified_base 22: mod_base = OTHER; note = 2'-O-methylcytidine-3'-phosphorothioate
  modified_base 23: mod_base = OTHER; note = 2'-O-methyladenosine
aagaggaatgcccagctcccaca

SEQ ID NO: 533 - RNA, 23 nt, synthetic construct
  source 1..23: mol_type = other RNA
  modified_base 1: mod_base = OTHER; note = 2'-O-methyladenosine-3'-phosphorothioate
  modified_base 2: mod_base = OTHER; note = 2'-deoxy-2'-fluorouridine-3'-phosphorothioate
  modified_base 3: mod_base = OTHER; note = 2'-O-methylcytidine-3'-phosphate
  modified_base 4: mod_base = OTHER; note = 2'-O-methylcytidine-3'-phosphate
  modified_base 5: mod_base = OTHER; note = 2'-O-methylcytidine-3'-phosphate
  modified_base 6: mod_base = OTHER; note = 2'-deoxy-2'-fluoroadenosine-3'-phosphate
  modified_base 7: mod_base = OTHER; note = 2'-O-methyluridine-3'-phosphate
  modified_base 8: mod_base = OTHER; note = 2'-deoxy-2'-fluorocytidine-3'-phosphate
  modified_base 9: mod_base = OTHER; note = 2'-deoxy-2'-fluorocytidine-3'-phosphate
  modified_base 10: mod_base = OTHER; note = 2'-O-methyladenosine-3'-phosphate
  modified_base 11: mod_base = OTHER; note = 2'-O-methylguanosine-3'-phosphate
  modified_base 12: mod_base = OTHER; note = 2'-O-methyladenosine-3'-phosphate
  modified_base 13: mod_base = OTHER; note = 2'-O-methylguanosine-3'-phosphate
  modified_base 14: mod_base = OTHER; note = 2'-deoxy-2'-fluoroguanosine-3'-phosphate
  modified_base 15: mod_base = OTHER; note = 2'-O-methyladenosine-3'-phosphate
  modified_base 16: mod_base = OTHER; note = 2'-deoxy-2'-fluoroadenosine-3'-phosphate
  modified_base 17: mod_base = OTHER; note = 2'-O-methyluridine-3'-phosphate
  modified_base 18: mod_base = OTHER; note = 2'-O-methylguanosine-3'-phosphate
  modified_base 19: mod_base = OTHER; note = 2'-O-methylcytidine-3'-phosphate
  modified_base 20: mod_base = OTHER; note = 2'-O-methylcytidine-3'-phosphate
  modified_base 21: mod_base = OTHER; note = 2'-O-methylcytidine-3'-phosphorothioate
  modified_base 22: mod_base = OTHER; note = 2'-O-methyladenosine-3'-phosphorothioate
  modified_base 23: mod_base = OTHER; note = 2'-O-methylguanosine
atcccatccagaggaatgcccag

SEQ ID NO: 534 - RNA, 23 nt, synthetic construct
  source 1..23: mol_type = other RNA
  modified_base 1: mod_base = OTHER; note = 2'-O-methyladenosine-3'-phosphorothioate
  modified_base 2: mod_base = OTHER; note = 2'-deoxy-2'-fluoroguanosine-3'-phosphorothioate
  modified_base 3: mod_base = OTHER; note = 2'-O-methyladenosine-3'-phosphate
  modified_base 4: mod_base = OTHER; note = 2'-O-methylcytidine-3'-phosphate
  modified_base 5: mod_base = OTHER; note = 2'-O-methyladenosine-3'-phosphate
  modified_base 6: mod_base = OTHER; note = 2'-deoxy-2'-fluoroguanosine-3'-phosphate
  modified_base 7: mod_base = OTHER; note = 2'-O-methyluridine-3'-phosphate
  modified_base 8: mod_base = OTHER; note = 2'-deoxy-2'-fluorocytidine-3'-phosphate
  modified_base 9: mod_base = OTHER; note = 2'-deoxy-2'-fluorocytidine-3'-phosphate
  modified_base 10: mod_base = OTHER; note = 2'-O-methylcytidine-3'-phosphate
  modified_base 11: mod_base = OTHER; note = 2'-O-methyladenosine-3'-phosphate
  modified_base 12: mod_base = OTHER; note = 2'-O-methyluridine-3'-phosphate
  modified_base 13: mod_base = OTHER; note = 2'-O-methylcytidine-3'-phosphate
  modified_base 14: mod_base = OTHER; note = 2'-deoxy-2'-fluorocytidine-3'-phosphate
  modified_base 15: mod_base = OTHER; note = 2'-O-methyladenosine-3'-phosphate
  modified_base 16: mod_base = OTHER; note = 2'-deoxy-2'-fluoroguanosine-3'-phosphate
  modified_base 17: mod_base = OTHER; note = 2'-O-methyladenosine-3'-phosphate
  modified_base 18: mod_base = OTHER; note = 2'-O-methylguanosine-3'-phosphate
  modified_base 19: mod_base = OTHER; note = 2'-O-methylguanosine-3'-phosphate
  modified_base 20: mod_base = OTHER; note = 2'-O-methyladenosine-3'-phosphate
  modified_base 21: mod_base = OTHER; note = 2'-O-methyladenosine-3'-phosphorothioate
  modified_base 22: mod_base = OTHER; note = 2'-O-methyluridine-3'-phosphorothioate
  modified_base 23: mod_base = OTHER; note = 2'-O-methylguanosine
agacagtcccatccagaggaatg

SEQ ID NO: 535 - RNA, 23 nt, synthetic construct
  source 1..23: mol_type = other RNA
  modified_base 1: mod_base = OTHER; note = 2'-O-methyladenosine-3'-phosphorothioate
  modified_base 2: mod_base = OTHER; note = 2'-deoxy-2'-fluoroadenosine-3'-phosphorothioate
  modified_base 3: mod_base = OTHER; note = 2'-O-methyladenosine-3'-phosphate
  modified_base 4: mod_base = OTHER; note = 2'-O-methyladenosine-3'-phosphate
  modified_base 5: mod_base = OTHER; note = 2'-O-methylcytidine-3'-phosphate
  modified_base 6: mod_base = OTHER; note = 2'-deoxy-2'-fluoroadenosine-3'-phosphate
  modified_base 7: mod_base = OTHER; note = 2'-O-methylguanosine-3'-phosphate
  modified_base 8: mod_base = OTHER; note = 2'-deoxy-2'-fluoroadenosine-3'-phosphate
  modified_base 9: mod_base = OTHER; note = 2'-deoxy-2'-fluorocytidine-3'-phosphate
  modified_base 10: mod_base = OTHER; note = 2'-O-methyladenosine-3'-phosphate
  modified_base 11: mod_base = OTHER; note = 2'-O-methylguanosine-3'-phosphate
  modified_base 12: mod_base = OTHER; note = 2'-O-methyluridine-3'-phosphate
  modified_base 13: mod_base = OTHER; note = 2'-O-methylcytidine-3'-phosphate
  modified_base 14: mod_base = OTHER; note = 2'-deoxy-2'-fluorocytidine-3'-phosphate
  modified_base 15: mod_base = OTHER; note = 2'-O-methylcytidine-3'-phosphate
  modified_base 16: mod_base = OTHER; note = 2'-deoxy-2'-fluoroadenosine-3'-phosphate
  modified_base 17: mod_base = OTHER; note = 2'-O-methyluridine-3'-phosphate
  modified_base 18: mod_base = OTHER; note = 2'-O-methylcytidine-3'-phosphate
  modified_base 19: mod_base = OTHER; note = 2'-O-methylcytidine-3'-phosphate
  modified_base 20: mod_base = OTHER; note = 2'-O-methyladenosine-3'-phosphate
  modified_base 21: mod_base = OTHER; note = 2'-O-methylguanosine-3'-phosphorothioate
  modified_base 22: mod_base = OTHER; note = 2'-O-methyladenosine-3'-phosphorothioate
  modified_base 23: mod_base = OTHER; note = 2'-O-methylguanosine
aaaacagacagtcccatccagag

SEQ ID NO: 536 - RNA, 23 nt, synthetic construct
  source 1..23: mol_type = other RNA
  modified_base 1: mod_base = OTHER; note = 2'-O-methyladenosine-3'-phosphorothioate
  modified_base 2: mod_base = OTHER; note = 2'-deoxy-2'-fluoroguanosine-3'-phosphorothioate
  modified_base 3: mod_base = OTHER; note = 2'-O-methyluridine-3'-phosphate
  modified_base 4: mod_base = OTHER; note = 2'-O-methylcytidine-3'-phosphate
  modified_base 5: mod_base = OTHER; note = 2'-O-methylcytidine-3'-phosphate
  modified_base 6: mod_base = OTHER; note = 2'-deoxy-2'-fluoroguanosine-3'-phosphate
  modified_base 7: mod_base = OTHER; note = 2'-O-methyladenosine-3'-phosphate
  modified_base 8: mod_base = OTHER; note = 2'-deoxy-2'-fluoroadenosine-3'-phosphate
  modified_base 9: mod_base = OTHER; note = 2'-deoxy-2'-fluoroadenosine-3'-phosphate
  modified_base 10: mod_base = OTHER; note = 2'-O-methylcytidine-3'-phosphate
  modified_base 11: mod_base = OTHER; note = 2'-O-methyladenosine-3'-phosphate
  modified_base 12: mod_base = OTHER; note = 2'-O-methylguanosine-3'-phosphate
  modified_base 13: mod_base = OTHER; note = 2'-O-methyladenosine-3'-phosphate
  modified_base 14: mod_base = OTHER; note = 2'-deoxy-2'-fluorocytidine-3'-phosphate
  modified_base 15: mod_base = OTHER; note = 2'-O-methyladenosine-3'-phosphate
  modified_base 16: mod_base = OTHER; note = 2'-deoxy-2'-fluoroguanosine-3'-phosphate
  modified_base 17: mod_base = OTHER; note = 2'-O-methyluridine-3'-phosphate
  modified_base 18: mod_base = OTHER; note = 2'-O-methylcytidine-3'-phosphate
  modified_base 19: mod_base = OTHER; note = 2'-O-methylcytidine-3'-phosphate
  modified_base 20: mod_base = OTHER; note = 2'-O-methylcytidine-3'-phosphate
  modified_base 21: mod_base = OTHER; note = 2'-O-methyladenosine-3'-phosphorothioate
  modified_base 22: mod_base = OTHER; note = 2'-O-methyluridine-3'-phosphorothioate
  modified_base 23: mod_base = OTHER; note = 2'-O-methylcytidine
agtccgaaacagacagtcccatc

SEQ ID NO: 537 - RNA, 23 nt, synthetic construct
  source 1..23: mol_type = other RNA
  modified_base 1: mod_base = OTHER; note = 2'-O-methyladenosine-3'-phosphorothioate
  modified_base 2: mod_base = OTHER; note = 2'-deoxy-2'-fluoroadenosine-3'-phosphorothioate
  modified_base 3: mod_base = OTHER; note = 2'-O-methyladenosine-3'-phosphate
  modified_base 4: mod_base = OTHER; note = 2'-O-methylguanosine-3'-phosphate
  modified_base 5: mod_base = OTHER; note = 2'-O-methyluridine-3'-phosphate
  modified_base 6: mod_base = OTHER; note = 2'-deoxy-2'-fluorouridine-3'-phosphate
  modified_base 7: mod_base = OTHER; note = 2'-O-methylguanosine-3'-phosphate
  modified_base 8: mod_base = OTHER; note = 2'-deoxy-2'-fluorouridine-3'-phosphate
  modified_base 9: mod_base = OTHER; note = 2'-deoxy-2'-fluorocytidine-3'-phosphate
  modified_base 10: mod_base = OTHER; note = 2'-O-methylcytidine-3'-phosphate
  modified_base 11: mod_base = OTHER; note = 2'-O-methylguanosine-3'-phosphate
  modified_base 12: mod_base = OTHER; note = 2'-O-methyladenosine-3'-phosphate
  modified_base 13: mod_base = OTHER; note = 2'-O-methyladenosine-3'-phosphate
  modified_base 14: mod_base = OTHER; note = 2'-deoxy-2'-fluoroadenosine-3'-phosphate
  modified_base 15: mod_base = OTHER; note = 2'-O-methylcytidine-3'-phosphate
  modified_base 16: mod_base = OTHER; note = 2'-deoxy-2'-fluoroadenosine-3'-phosphate
  modified_base 17: mod_base = OTHER; note = 2'-O-methylguanosine-3'-phosphate
  modified_base 18: mod_base = OTHER; note = 2'-O-methyladenosine-3'-phosphate
  modified_base 19: mod_base = OTHER; note = 2'-O-methylcytidine-3'-phosphate
  modified_base 20: mod_base = OTHER; note = 2'-O-methyladenosine-3'-phosphate
  modified_base 21: mod_base = OTHER; note = 2'-O-methylguanosine-3'-phosphorothioate
  modified_base 22: mod_base = OTHER; note = 2'-O-methyluridine-3'-phosphorothioate
  modified_base 23: mod_base = OTHER; note = 2'-O-methylcytidine
aaagttgtccgaaacagacagtc

SEQ ID NO: 538 - RNA, 23 nt, synthetic construct
  source 1..23: mol_type = other RNA
  modified_base 1: mod_base = OTHER; note = 2'-O-methyladenosine-3'-phosphorothioate
  modified_base 2: mod_base = OTHER; note = 2'-deoxy-2'-fluoroadenosine-3'-phosphorothioate
  modified_base 3: mod_base = OTHER; note = 2'-O-methyluridine-3'-phosphate
  modified_base 4: mod_base = OTHER; note = 2'-O-methylguanosine-3'-phosphate
  modified_base 5: mod_base = OTHER; note = 2'-O-methylcytidine-3'-phosphate
  modified_base 6: mod_base = OTHER; note = 2'-deoxy-2'-fluorocytidine-3'-phosphate
  modified_base 7: mod_base = OTHER; note = 2'-O-methylcytidine-3'-phosphate
  modified_base 8: mod_base = OTHER; note = 2'-deoxy-2'-fluoroadenosine-3'-phosphate
  modified_base 9: mod_base = OTHER; note = 2'-deoxy-2'-fluoroguanosine-3'-phosphate
  modified_base 10: mod_base = OTHER; note = 2'-O-methyladenosine-3'-phosphate
  modified_base 11: mod_base = OTHER; note = 2'-O-methyladenosine-3'-phosphate
  modified_base 12: mod_base = OTHER; note = 2'-O-methylguanosine-3'-phosphate
  modified_base 13: mod_base = OTHER; note = 2'-O-methyluridine-3'-phosphate
  modified_base 14: mod_base = OTHER; note = 2'-deoxy-2'-fluorouridine-3'-phosphate
  modified_base 15: mod_base = OTHER; note = 2'-O-methylguanosine-3'-phosphate
  modified_base 16: mod_base = OTHER; note = 2'-deoxy-2'-fluorouridine-3'-phosphate
  modified_base 17: mod_base = OTHER; note = 2'-O-methylcytidine-3'-phosphate
  modified_base 18: mod_base = OTHER; note = 2'-O-methylcytidine-3'-phosphate
  modified_base 19: mod_base = OTHER; note = 2'-O-methylguanosine-3'-phosphate
  modified_base 20: mod_base = OTHER; note = 2'-O-methyladenosine-3'-phosphate
  modified_base 21: mod_base = OTHER; note = 2'-O-methyladenosine-3'-phosphorothioate
  modified_base 22: mod_base = OTHER; note = 2'-O-methyladenosine-3'-phosphorothioate
  modified_base 23: mod_base = OTHER; note = 2'-O-methylcytidine
aatgcccagaagttgtccgaaac

SEQ ID NO: 539 - RNA, 23 nt, synthetic construct
  source 1..23: mol_type = other RNA
  modified_base 1: mod_base = OTHER; note = 2'-O-methyladenosine-3'-phosphorothioate
  modified_base 2: mod_base = OTHER; note = 2'-deoxy-2'-fluorouridine-3'-phosphorothioate
  modified_base 3: mod_base = OTHER; note = 2'-O-methylguanosine-3'-phosphate
  modified_base 4: mod_base = OTHER; note = 2'-O-methylguanosine-3'-phosphate
  modified_base 5: mod_base = OTHER; note = 2'-O-methyluridine-3'-phosphate
  modified_base 6: mod_base = OTHER; note = 2'-deoxy-2'-fluorocytidine-3'-phosphate
  modified_base 7: mod_base = OTHER; note = 2'-O-methyladenosine-3'-phosphate
  modified_base 8: mod_base = OTHER; note = 2'-deoxy-2'-fluorocytidine-3'-phosphate
  modified_base 9: mod_base = OTHER; note = 2'-deoxy-2'-fluoroadenosine-3'-phosphate
  modified_base 10: mod_base = OTHER; note = 2'-O-methylcytidine-3'-phosphate
  modified_base 11: mod_base = OTHER; note = 2'-O-methyladenosine-3'-phosphate
  modified_base 12: mod_base = OTHER; note = 2'-O-methyluridine-3'-phosphate
  modified_base 13: mod_base = OTHER; note = 2'-O-methylguanosine-3'-phosphate
  modified_base 14: mod_base = OTHER; note = 2'-deoxy-2'-fluorocytidine-3'-phosphate
  modified_base 15: mod_base = OTHER; note = 2'-O-methylcytidine-3'-phosphate
  modified_base 16: mod_base = OTHER; note = 2'-deoxy-2'-fluorocytidine-3'-phosphate
  modified_base 17: mod_base = OTHER; note = 2'-O-methyladenosine-3'-phosphate
  modified_base 18: mod_base = OTHER; note = 2'-O-methylguanosine-3'-phosphate
  modified_base 19: mod_base = OTHER; note = 2'-O-methyladenosine-3'-phosphate
  modified_base 20: mod_base = OTHER; note = 2'-O-methyladenosine-3'-phosphate
  modified_base 21: mod_base = OTHER; note = 2'-O-methylguanosine-3'-phosphorothioate
  modified_base 22: mod_base = OTHER; note = 2'-O-methyluridine-3'-phosphorothioate
  modified_base 23: mod_base = OTHER; note = 2'-O-methyluridine
atggtcacacatgcccagaagtt

SEQ ID NO: 540 - RNA, 23 nt, synthetic construct
  source 1..23: mol_type = other RNA
  modified_base 1: mod_base = OTHER; note = 2'-O-methyladenosine-3'-phosphorothioate
  modified_base 2: mod_base = OTHER; note = 2'-deoxy-2'-fluoroadenosine-3'-phosphorothioate
  modified_base 3: mod_base = OTHER; note = 2'-O-methylguanosine-3'-phosphate
  modified_base 4: mod_base = OTHER; note = 2'-O-methyladenosine-3'-phosphate
  modified_base 5: mod_base = OTHER; note = 2'-O-methylguanosine-3'-phosphate
  modified_base 6: mod_base = OTHER; note = 2'-deoxy-2'-fluoroadenosine-3'-phosphate
  modified_base 7: mod_base = OTHER; note = 2'-O-methylguanosine-3'-phosphate
  modified_base 8: mod_base = OTHER; note = 2'-deoxy-2'-fluoroadenosine-3'-phosphate
  modified_base 9: mod_base = OTHER; note = 2'-deoxy-2'-fluorocytidine-3'-phosphate
  modified_base 10: mod_base = OTHER; note = 2'-O-methylguanosine-3'-phosphate
  modified_base 11: mod_base = OTHER; note = 2'-O-methyluridine-3'-phosphate
  modified_base 12: mod_base = OTHER; note = 2'-O-methylguanosine-3'-phosphate
  modified_base 13: mod_base = OTHER; note = 2'-O-methylguanosine-3'-phosphate
  modified_base 14: mod_base = OTHER; note = 2'-deoxy-2'-fluorouridine-3'-phosphate
  modified_base 15: mod_base = OTHER; note = 2'-O-methylcytidine-3'-phosphate
  modified_base 16: mod_base = OTHER; note = 2'-deoxy-2'-fluoroadenosine-3'-phosphate
  modified_base 17: mod_base = OTHER; note = 2'-O-methylcytidine-3'-phosphate
  modified_base 18: mod_base = OTHER; note = 2'-O-methyladenosine-3'-phosphate
  modified_base 19: mod_base = OTHER; note = 2'-O-methylcytidine-3'-phosphate
  modified_base 20: mod_base = OTHER; note = 2'-O-methyladenosine-3'-phosphate
  modified_base 21: mod_base = OTHER; note = 2'-O-methyluridine-3'-phosphorothioate
  modified_base 22: mod_base = OTHER; note = 2'-O-methylguanosine-3'-phosphorothioate
  modified_base 23: mod_base = OTHER; note = 2'-O-methylcytidine
aagagagacgtggtcacacatgc

SEQ ID NO: 541 - RNA, 23 nt, synthetic construct
  source 1..23: mol_type = other RNA
  modified_base 1: mod_base = OTHER; note = 2'-O-methyladenosine-3'-phosphorothioate
  modified_base 2: mod_base = OTHER; note = 2'-deoxy-2'-fluoroadenosine-3'-phosphorothioate
  modified_base 3: mod_base = OTHER; note = 2'-O-methylguanosine-3'-phosphate
  modified_base 4: mod_base = OTHER; note = 2'-O-methyluridine-3'-phosphate
  modified_base 5: mod_base = OTHER; note = 2'-O-methylguanosine-3'-phosphate
  modified_base 6: mod_base = OTHER; note = 2'-deoxy-2'-fluorocytidine-3'-phosphate
  modified_base 7: mod_base = OTHER; note = 2'-O-methyluridine-3'-phosphate
  modified_base 8: mod_base = OTHER; note = 2'-deoxy-2'-fluoroadenosine-3'-phosphate
  modified_base 9: mod_base = OTHER; note = 2'-deoxy-2'-fluoroguanosine-3'-phosphate
  modified_base 10: mod_base = OTHER; note = 2'-O-methyladenosine-3'-phosphate
  modified_base 11: mod_base = OTHER; note = 2'-O-methylguanosine-3'-phosphate
  modified_base 12: mod_base = OTHER; note = 2'-O-methyladenosine-3'-phosphate
  modified_base 13: mod_base = OTHER; note = 2'-O-methylguanosine-3'-phosphate
  modified_base 14: mod_base = OTHER; note = 2'-deoxy-2'-fluoroadenosine-3'-phosphate
  modified_base 15: mod_base = OTHER; note = 2'-O-methylcytidine-3'-phosphate
  modified_base 16: mod_base = OTHER; note = 2'-deoxy-2'-fluoroguanosine-3'-phosphate
  modified_base 17: mod_base = OTHER; note = 2'-O-methyluridine-3'-phosphate
  modified_base 18: mod_base = OTHER; note = 2'-O-methylguanosine-3'-phosphate
  modified_base 19: mod_base = OTHER; note = 2'-O-methylguanosine-3'-phosphate
  modified_base 20: mod_base = OTHER; note = 2'-O-methyluridine-3'-phosphate
  modified_base 21: mod_base = OTHER; note = 2'-O-methylcytidine-3'-phosphorothioate
  modified_base 22: mod_base = OTHER; note = 2'-O-methyladenosine-3'-phosphorothioate
  modified_base 23: mod_base = OTHER; note = 2'-O-methylcytidine
aagtgctagagagacgtggtcac

SEQ ID NO: 542 - RNA, 23 nt, synthetic construct
  source 1..23: mol_type = other RNA
  modified_base 1: mod_base = OTHER; note = 2'-O-methyladenosine-3'-phosphorothioate
  modified_base 2: mod_base = OTHER; note = 2'-deoxy-2'-fluoroadenosine-3'-phosphorothioate
  modified_base 3: mod_base = OTHER; note = 2'-O-methylcytidine-3'-phosphate
  modified_base 4: mod_base = OTHER; note = 2'-O-methyladenosine-3'-phosphate
  modified_base 5: mod_base = OTHER; note = 2'-O-methylcytidine-3'-phosphate
  modified_base 6: mod_base = OTHER; note = 2'-deoxy-2'-fluorouridine-3'-phosphate
  modified_base 7: mod_base = OTHER; note = 2'-O-methyladenosine-3'-phosphate
  modified_base 8: mod_base = OTHER; note = 2'-deoxy-2'-fluorocytidine-3'-phosphate
  modified_base 9: mod_base = OTHER; note = 2'-deoxy-2'-fluoroadenosine-3'-phosphate
  modified_base 10: mod_base = OTHER; note = 2'-O-methyluridine-3'-phosphate
  modified_base 11: mod_base = OTHER; note = 2'-O-methyladenosine-3'-phosphate
  modified_base 12: mod_base = OTHER; note = 2'-O-methylguanosine-3'-phosphate
  modified_base 13: mod_base = OTHER; note = 2'-O-methylcytidine-3'-phosphate
  modified_base 14: mod_base = OTHER; note = 2'-deoxy-2'-fluorocytidine-3'-phosphate
  modified_base 15: mod_base = OTHER; note = 2'-O-methylguanosine-3'-phosphate
  modified_base 16: mod_base = OTHER; note = 2'-deoxy-2'-fluoroguanosine-3'-phosphate
  modified_base 17: mod_base = OTHER; note = 2'-O-methylcytidine-3'-phosphate
  modified_base 18: mod_base = OTHER; note = 2'-O-methylcytidine-3'-phosphate
  modified_base 19: mod_base = OTHER; note = 2'-O-methyluridine-3'-phosphate
  modified_base 20: mod_base = OTHER; note = 2'-O-methylguanosine-3'-phosphate
  modified_base 21: mod_base = OTHER; note = 2'-O-methylcytidine-3'-phosphorothioate
  modified_base 22: mod_base = OTHER; note = 2'-O-methylcytidine-3'-phosphorothioate
  modified_base 23: mod_base = OTHER; note = 2'-O-methylcytidine
aacactacatagccggcctgccc

SEQ ID NO: 543 - RNA, 23 nt, synthetic construct
  source 1..23: mol_type = other RNA
  modified_base 1: mod_base = OTHER; note = 2'-O-methyladenosine-3'-phosphorothioate
  modified_base 2: mod_base = OTHER; note = 2'-deoxy-2'-fluorocytidine-3'-phosphorothioate
  modified_base 3: mod_base = OTHER; note = 2'-O-methyluridine-3'-phosphate
  modified_base 4: mod_base = OTHER; note = 2'-O-methyluridine-3'-phosphate
  modified_base 5: mod_base = OTHER; note = 2'-O-methyladenosine-3'-phosphate
  modified_base 6: mod_base = OTHER; note = 2'-deoxy-2'-fluorouridine-3'-phosphate
  modified_base 7: mod_base = OTHER; note = 2'-O-methyladenosine-3'-phosphate
  modified_base 8: mod_base = OTHER; note = 2'-deoxy-2'-fluorocytidine-3'-phosphate
  modified_base 9: mod_base = OTHER; note = 2'-deoxy-2'-fluoroadenosine-3'-phosphate
  modified_base 10: mod_base = OTHER; note = 2'-O-methylcytidine-3'-phosphate
  modified_base 11: mod_base = OTHER; note = 2'-O-methyluridine-3'-phosphate
  modified_base 12: mod_base = OTHER; note = 2'-O-methyladenosine-3'-phosphate
  modified_base 13: mod_base = OTHER; note = 2'-O-methylcytidine-3'-phosphate
  modified_base 14: mod_base = OTHER; note = 2'-deoxy-2'-fluoroadenosine-3'-phosphate
  modified_base 15: mod_base = OTHER; note = 2'-O-methyluridine-3'-phosphate
  modified_base 16: mod_base = OTHER; note = 2'-deoxy-2'-fluoroadenosine-3'-phosphate
  modified_base 17: mod_base = OTHER; note = 2'-O-methylguanosine-3'-phosphate
  modified_base 18: mod_base = OTHER; note = 2'-O-methylcytidine-3'-phosphate
  modified_base 19: mod_base = OTHER; note = 2'-O-methylcytidine-3'-phosphate
  modified_base 20: mod_base = OTHER; note = 2'-O-methylguanosine-3'-phosphate
  modified_base 21: mod_base = OTHER; note = 2'-O-methylguanosine-3'-phosphorothioate
  modified_base 22: mod_base = OTHER; note = 2'-O-methylcytidine-3'-phosphorothioate
  modified_base 23: mod_base = OTHER; note = 2'-O-methylcytidine
acttatacactacatagccggcc

SEQ ID NO: 544 - RNA, 23 nt, synthetic construct
  source 1..23: mol_type = other RNA
  modified_base 1: mod_base = OTHER; note = 2'-O-methyladenosine-3'-phosphorothioate
  modified_base 2: mod_base = OTHER; note = 2'-deoxy-2'-fluoroadenosine-3'-phosphorothioate
  modified_base 3: mod_base = OTHER; note = 2'-O-methyladenosine-3'-phosphate
  modified_base 4: mod_base = OTHER; note = 2'-O-methyluridine-3'-phosphate
  modified_base 5: mod_base = OTHER; note = 2'-O-methylguanosine-3'-phosphate
  modified_base 6: mod_base = OTHER; note = 2'-deoxy-2'-fluoroguanosine-3'-phosphate
  modified_base 7: mod_base = OTHER; note = 2'-O-methyladenosine-3'-phosphate
  modified_base 8: mod_base = OTHER; note = 2'-deoxy-2'-fluorocytidine-3'-phosphate
  modified_base 9: mod_base = OTHER; note = 2'-deoxy-2'-fluorouridine-3'-phosphate
  modified_base 10: mod_base = OTHER; note = 2'-O-methyluridine-3'-phosphate
  modified_base 11: mod_base = OTHER; note = 2'-O-methyladenosine-3'-phosphate
  modified_base 12: mod_base = OTHER; note = 2'-O-methyluridine-3'-phosphate
  modified_base 13: mod_base = OTHER; note = 2'-O-methyladenosine-3'-phosphate
  modified_base 14: mod_base = OTHER; note = 2'-deoxy-2'-fluorocytidine-3'-phosphate
  modified_base 15: mod_base = OTHER; note = 2'-O-methyladenosine-3'-phosphate
  modified_base 16: mod_base = OTHER; note = 2'-deoxy-2'-fluorocytidine-3'-phosphate
  modified_base 17: mod_base = OTHER; note = 2'-O-methyluridine-3'-phosphate
  modified_base 18: mod_base = OTHER; note = 2'-O-methyladenosine-3'-phosphate
  modified_base 19: mod_base = OTHER; note = 2'-O-methylcytidine-3'-phosphate
  modified_base 20: mod_base = OTHER; note = 2'-O-methyladenosine-3'-phosphate
  modified_base 21: mod_base = OTHER; note = 2'-O-methyluridine-3'-phosphorothioate
  modified_base 22: mod_base = OTHER; note = 2'-O-methyladenosine-3'-phosphorothioate
  modified_base 23: mod_base = OTHER; note = 2'-O-methylguanosine
aaatggacttatacactacatag

SEQ ID NO: 545 - RNA, 23 nt, synthetic construct
  source 1..23: mol_type = other RNA
  modified_base 1: mod_base = OTHER; note = 2'-O-methyladenosine-3'-phosphorothioate
  modified_base 2: mod_base = OTHER; note = 2'-deoxy-2'-fluorouridine-3'-phosphorothioate
  modified_base 3: mod_base = OTHER; note = 2'-O-methyladenosine-3'-phosphate
  modified_base 4: mod_base = OTHER; note = 2'-O-methylguanosine-3'-phosphate
  modified_base 5: mod_base = OTHER; note = 2'-O-methylguanosine-3'-phosphate
  modified_base 6: mod_base = OTHER; note = 2'-deoxy-2'-fluoroguanosine-3'-phosphate
  modified_base 7: mod_base = OTHER; note = 2'-O-methyladenosine-3'-phosphate
  modified_base 8: mod_base = OTHER; note = 2'-deoxy-2'-fluoroadenosine-3'-phosphate
  modified_base 9: mod_base = OTHER; note = 2'-deoxy-2'-fluorouridine-3'-phosphate
  modified_base 10: mod_base = OTHER; note = 2'-O-methylguanosine-3'-phosphate
  modified_base 11: mod_base = OTHER; note = 2'-O-methylguanosine-3'-phosphate
  modified_base 12: mod_base = OTHER; note = 2'-O-methyladenosine-3'-phosphate
  modified_base 13: mod_base = OTHER; note = 2'-O-methylcytidine-3'-phosphate
  modified_base 14: mod_base = OTHER; note = 2'-deoxy-2'-fluorouridine-3'-phosphate
  modified_base 15: mod_base = OTHER; note = 2'-O-methyluridine-3'-phosphate
  modified_base 16: mod_base = OTHER; note = 2'-deoxy-2'-fluoroadenosine-3'-phosphate
  modified_base 17: mod_base = OTHER; note = 2'-O-methyluridine-3'-phosphate
  modified_base 18: mod_base = OTHER; note = 2'-O-methyladenosine-3'-phosphate
  modified_base 19: mod_base = OTHER; note = 2'-O-methylcytidine-3'-phosphate
  modified_base 20: mod_base = OTHER; note = 2'-O-methyladenosine-3'-phosphate
  modified_base 21: mod_base = OTHER; note = 2'-O-methylcytidine-3'-phosphorothioate
  modified_base 22: mod_base = OTHER; note = 2'-O-methyluridine-3'-phosphorothioate
  modified_base 23: mod_base = OTHER; note = 2'-O-methyladenosine
atagggaatggacttatacacta

SEQ ID NO: 546 - RNA, 23 nt, synthetic construct
  source 1..23: mol_type = other RNA
  modified_base 1: mod_base = OTHER; note = 2'-O-methyladenosine-3'-phosphorothioate
  modified_base 2: mod_base = OTHER; note = 2'-deoxy-2'-fluoroguanosine-3'-phosphorothioate
  modified_base 3: mod_base = OTHER; note = 2'-O-methyladenosine-3'-phosphate
  modified_base 4: mod_base = OTHER; note = 2'-O-methylguanosine-3'-phosphate
  modified_base 5: mod_base = OTHER; note = 2'-O-methylcytidine-3'-phosphate
  modified_base 6: mod_base = OTHER; note = 2'-deoxy-2'-fluorocytidine-3'-phosphate
  modified_base 7: mod_base = OTHER; note = 2'-O-methyladenosine-3'-phosphate
  modified_base 8: mod_base = OTHER; note = 2'-deoxy-2'-fluorouridine-3'-phosphate
  modified_base 9: mod_base = OTHER; note = 2'-deoxy-2'-fluoroadenosine-3'-phosphate
  modified_base 10: mod_base = OTHER; note = 2'-O-methylguanosine-3'-phosphate
  modified_base 11: mod_base = OTHER; note = 2'-O-methylguanosine-3'-phosphate
  modified_base 12: mod_base = OTHER; note = 2'-O-methylguanosine-3'-phosphate
  modified_base 13: mod_base = OTHER; note = 2'-O-methyladenosine-3'-phosphate
  modified_base 14: mod_base = OTHER; note = 2'-deoxy-2'-fluoroadenosine-3'-phosphate
  modified_base 15: mod_base = OTHER; note = 2'-O-methyluridine-3'-phosphate
  modified_base 16: mod_base = OTHER; note = 2'-deoxy-2'-fluoroguanosine-3'-phosphate
  modified_base 17: mod_base = OTHER; note = 2'-O-methylguanosine-3'-phosphate
  modified_base 18: mod_base = OTHER; note = 2'-O-methyladenosine-3'-phosphate
  modified_base 19: mod_base = OTHER; note = 2'-O-methylcytidine-3'-phosphate
  modified_base 20: mod_base = OTHER; note = 2'-O-methyluridine-3'-phosphate
  modified_base 21: mod_base = OTHER; note = 2'-O-methyluridine-3'-phosphorothioate
  modified_base 22: mod_base = OTHER; note = 2'-O-methyladenosine-3'-phosphorothioate
  modified_base 23: mod_base = OTHER; note = 2'-O-methyluridine
agagccatagggaatggacttat

SEQ ID NO: 547 - RNA, 23 nt, synthetic construct
  source 1..23: mol_type = other RNA
  modified_base 1: mod_base = OTHER; note = 2'-O-methyladenosine-3'-phosphorothioate
  modified_base 2: mod_base = OTHER; note = 2'-deoxy-2'-fluorocytidine-3'-phosphorothioate
  modified_base 3: mod_base = OTHER; note = 2'-O-methyluridine-3'-phosphate
  modified_base 4: mod_base = OTHER; note = 2'-O-methylcytidine-3'-phosphate
  modified_base 5: mod_base = OTHER; note = 2'-O-methylcytidine-3'-phosphate
  modified_base 6: mod_base = OTHER; note = 2'-deoxy-2'-fluoroadenosine-3'-phosphate
  modified_base 7: mod_base = OTHER; note = 2'-O-methyladenosine-3'-phosphate
  modified_base 8: mod_base = OTHER; note = 2'-deoxy-2'-fluoroguanosine-3'-phosphate
  modified_base 9: mod_base = OTHER; note = 2'-deoxy-2'-fluoroguanosine-3'-phosphate
  modified_base 10: mod_base = OTHER; note = 2'-O-methyladenosine-3'-phosphate
  modified_base 11: mod_base = OTHER; note = 2'-O-methylguanosine-3'-phosphate
  modified_base 12: mod_base = OTHER; note = 2'-O-methylcytidine-3'-phosphate
  modified_base 13: mod_base = OTHER; note = 2'-O-methylcytidine-3'-phosphate
  modified_base 14: mod_base = OTHER; note = 2'-deoxy-2'-fluoroadenosine-3'-phosphate
  modified_base 15: mod_base = OTHER; note = 2'-O-methyluridine-3'-phosphate
  modified_base 16: mod_base = OTHER; note = 2'-deoxy-2'-fluoroadenosine-3'-phosphate
  modified_base 17: mod_base = OTHER; note = 2'-O-methylguanosine-3'-phosphate
  modified_base 18: mod_base = OTHER; note = 2'-O-methylguanosine-3'-phosphate
  modified_base 19: mod_base = OTHER; note = 2'-O-methylguanosine-3'-phosphate
  modified_base 20: mod_base = OTHER; note = 2'-O-methyladenosine-3'-phosphate
  modified_base 21: mod_base = OTHER; note = 2'-O-methyladenosine-3'-phosphorothioate
  modified_base 22: mod_base = OTHER; note = 2'-O-methyluridine-3'-phosphorothioate
  modified_base 23: mod_base = OTHER; note = 2'-O-methylguanosine
actccaaggagccatagggaatg

SEQ ID NO: 548 - RNA, 23 nt, synthetic construct
  source 1..23: mol_type = other RNA
  modified_base 1: mod_base = OTHER; note = 2'-O-methyladenosine-3'-phosphorothioate
  modified_base 2: mod_base = OTHER; note = 2'-deoxy-2'-fluoroadenosine-3'-phosphorothioate
  modified_base 3: mod_base = OTHER; note = 2'-O-methyluridine-3'-phosphate
  modified_base 4: mod_base = OTHER; note = 2'-O-methyluridine-3'-phosphate
  modified_base 5: mod_base = OTHER; note = 2'-O-methyladenosine-3'-phosphate
  modified_base 6: mod_base = OTHER; note = 2'-deoxy-2'-fluorocytidine-3'-phosphate
  modified_base 7: mod_base = OTHER; note = 2'-O-methylcytidine-3'-phosphate
  modified_base 8: mod_base = OTHER; note = 2'-deoxy-2'-fluorouridine-3'-phosphate
  modified_base 9: mod_base = OTHER; note = 2'-deoxy-2'-fluorocytidine-3'-phosphate
  modified_base 10: mod_base = OTHER; note = 2'-O-methylcytidine-3'-phosphate
  modified_base 11: mod_base = OTHER; note = 2'-O-methyluridine-3'-phosphate
  modified_base 12: mod_base = OTHER; note = 2'-O-methylcytidine-3'-phosphate
  modified_base 13: mod_base = OTHER; note = 2'-O-methylcytidine-3'-phosphate
  modified_base 14: mod_base = OTHER; note = 2'-deoxy-2'-fluoroadenosine-3'-phosphate
  modified_base 15: mod_base = OTHER; note = 2'-O-methyladenosine-3'-phosphate
  modified_base 16: mod_base = OTHER; note = 2'-deoxy-2'-fluoroguanosine-3'-phosphate
  modified_base 17: mod_base = OTHER; note = 2'-O-methylguanosine-3'-phosphate
  modified_base 18: mod_base = OTHER; note = 2'-O-methyladenosine-3'-phosphate
  modified_base 19: mod_base = OTHER; note = 2'-O-methylguanosine-3'-phosphate
  modified_base 20: mod_base = OTHER; note = 2'-O-methylcytidine-3'-phosphate
  modified_base 21: mod_base = OTHER; note = 2'-O-methylcytidine-3'-phosphorothioate
  modified_base 22: mod_base = OTHER; note = 2'-O-methyladenosine-3'-phosphorothioate
  modified_base 23: mod_base = OTHER; note = 2'-O-methyluridine
aattacctcctccaaggagccat

SEQ ID NO: 549 - RNA, 23 nt, synthetic construct
  source 1..23: mol_type = other RNA
  modified_base 1: mod_base = OTHER; note = 2'-O-methyladenosine-3'-phosphorothioate
  modified_base 2: mod_base = OTHER; note = 2'-deoxy-2'-fluorouridine-3'-phosphorothioate
  modified_base 3: mod_base = OTHER; note = 2'-O-methyluridine-3'-phosphate
  modified_base 4: mod_base = OTHER; note = 2'-O-methylcytidine-3'-phosphate
  modified_base 5: mod_base = OTHER; note = 2'-O-methyluridine-3'-phosphate
  modified_base 6: mod_base = OTHER; note = 2'-deoxy-2'-fluorocytidine-3'-phosphate
  modified_base 7: mod_base = OTHER; note = 2'-O-methylcytidine-3'-phosphate
  modified_base 8: mod_base = OTHER; note = 2'-deoxy-2'-fluorouridine-3'-phosphate
  modified_base 9: mod_base = OTHER; note = 2'-deoxy-2'-fluoroguanosine-3'-phosphate
  modified_base 10: mod_base = OTHER; note = 2'-O-methylguanosine-3'-phosphate
  modified_base 11: mod_base = OTHER; note = 2'-O-methylguanosine-3'-phosphate
  modified_base 12: mod_base = OTHER; note = 2'-O-methylcytidine-3'-phosphate
  modified_base 13: mod_base = OTHER; note = 2'-O-methylcytidine-3'-phosphate
  modified_base 14: mod_base = OTHER; note = 2'-deoxy-2'-fluorocytidine-3'-phosphate
  modified_base 15: mod_base = OTHER; note = 2'-O-methyluridine-3'-phosphate
  modified_base 16: mod_base = OTHER; note = 2'-deoxy-2'-fluorocytidine-3'-phosphate
  modified_base 17: mod_base = OTHER; note = 2'-O-methylcytidine-3'-phosphate
  modified_base 18: mod_base = OTHER; note = 2'-O-methylguanosine-3'-phosphate
  modified_base 19: mod_base = OTHER; note = 2'-O-methylguanosine-3'-phosphate
  modified_base 20: mod_base = OTHER; note = 2'-O-methyladenosine-3'-phosphate
  modified_base 21: mod_base = OTHER; note = 2'-O-methyluridine-3'-phosphorothioate
  modified_base 22: mod_base = OTHER; note = 2'-O-methylcytidine-3'-phosphorothioate
  modified_base 23: mod_base = OTHER; note = 2'-O-methyladenosine
attctcctgggccctccggatca

SEQ ID NO: 550 - RNA, 23 nt, synthetic construct
  source 1..23: mol_type = other RNA
  modified_base 1: mod_base = OTHER; note = 2'-O-methyladenosine-3'-phosphorothioate
  modified_base 2: mod_base = OTHER; note = 2'-deoxy-2'-fluorocytidine-3'-phosphorothioate
  modified_base 3: mod_base = OTHER; note = 2'-O-methylcytidine-3'-phosphate
  modified_base 4: mod_base = OTHER; note = 2'-O-methyluridine-3'-phosphate
  modified_base 5: mod_base = OTHER; note = 2'-O-methylguanosine-3'-phosphate
  modified_base 6: mod_base = OTHER; note = 2'-deoxy-2'-fluoroadenosine-3'-phosphate
  modified_base 7: mod_base = OTHER; note = 2'-O-methyladenosine-3'-phosphate
  modified_base 8: mod_base = OTHER; note = 2'-deoxy-2'-fluoroguanosine-3'-phosphate
  modified_base 9: mod_base = OTHER; note = 2'-deoxy-2'-fluorocytidine-3'-phosphate
  modified_base 10: mod_base = OTHER; note = 2'-O-methyladenosine-3'-phosphate
  modified_base 11: mod_base = OTHER; note = 2'-O-methylcytidine-3'-phosphate
  modified_base 12: mod_base = OTHER; note = 2'-O-methylguanosine-3'-phosphate
  modified_base 13: mod_base = OTHER; note = 2'-O-methylcytidine-3'-phosphate
  modified_base 14: mod_base = OTHER; note = 2'-deoxy-2'-fluorouridine-3'-phosphate
  modified_base 15: mod_base = OTHER; note = 2'-O-methylcytidine-3'-phosphate
  modified_base 16: mod_base = OTHER; note = 2'-deoxy-2'-fluorocytidine-3'-phosphate
  modified_base 17: mod_base = OTHER; note = 2'-O-methylguanosine-3'-phosphate
  modified_base 18: mod_base = OTHER; note = 2'-O-methylguanosine-3'-phosphate
  modified_base 19: mod_base = OTHER; note = 2'-O-methyluridine-3'-phosphate
  modified_base 20: mod_base = OTHER; note = 2'-O-methyluridine-3'-phosphate
  modified_base 21: mod_base = OTHER; note = 2'-O-methylcytidine-3'-phosphorothioate
  modified_base 22: mod_base = OTHER; note = 2'-O-methyluridine-3'-phosphorothioate
  modified_base 23: mod_base = OTHER; note = 2'-O-methylcytidine
acctgaagcacgctccggttctc

SEQ ID NO: 551 - RNA, 23 nt, synthetic construct
  source 1..23: mol_type = other RNA
  modified_base 1: mod_base = OTHER; note = 2'-O-methyladenosine-3'-phosphorothioate
  modified_base 2: mod_base = OTHER; note = 2'-deoxy-2'-fluorouridine-3'-phosphorothioate
  modified_base 3: mod_base = OTHER; note = 2'-O-methylguanosine-3'-phosphate
  modified_base 4: mod_base = OTHER; note = 2'-O-methyluridine-3'-phosphate
  modified_base 5: mod_base = OTHER; note = 2'-O-methyluridine-3'-phosphate
  modified_base 6: mod_base = OTHER; note = 2'-deoxy-2'-fluorocytidine-3'-phosphate
  modified_base 7: mod_base = OTHER; note = 2'-O-methylcytidine-3'-phosphate
  modified_base 8: mod_base = OTHER; note = 2'-deoxy-2'-fluorocytidine-3'-phosphate
  modified_base 9: mod_base = OTHER; note = 2'-deoxy-2'-fluorouridine-3'-phosphate
  modified_base 10: mod_base = OTHER; note = 2'-O-methylguanosine-3'-phosphate
  modified_base 11: mod_base = OTHER; note = 2'-O-methylcytidine-3'-phosphate
  modified_base 12: mod_base = OTHER; note = 2'-O-methylguanosine-3'-phosphate
  modified_base 13: mod_base = OTHER; note = 2'-O-methylguanosine-3'-phosphate
  modified_base 14: mod_base = OTHER; note = 2'-deoxy-2'-fluoroguanosine-3'-phosphate
  modified_base 15: mod_base = OTHER; note = 2'-O-methylcytidine-3'-phosphate
  modified_base 16: mod_base = OTHER; note = 2'-deoxy-2'-fluoroadenosine-3'-phosphate
  modified_base 17: mod_base = OTHER; note = 2'-O-methylcytidine-3'-phosphate
  modified_base 18: mod_base = OTHER; note = 2'-O-methylcytidine-3'-phosphate
  modified_base 19: mod_base = OTHER; note = 2'-O-methylcytidine-3'-phosphate
  modified_base 20: mod_base = OTHER; note = 2'-O-methyluridine-3'-phosphate
  modified_base 21: mod_base = OTHER; note = 2'-O-methylguanosine-3'-phosphorothioate
  modified_base 22: mod_base = OTHER; note = 2'-O-methyladenosine-3'-phosphorothioate
  modified_base 23: mod_base = OTHER; note = 2'-O-methyladenosine
atgttccctgcgggcaccctgaa

SEQ ID NO: 552 - RNA, 23 nt, synthetic construct
  source 1..23: mol_type = other RNA
  modified_base 1: mod_base = OTHER; note = 2'-O-methyladenosine-3'-phosphorothioate
  modified_base 2: mod_base = OTHER; note = 2'-deoxy-2'-fluorouridine-3'-phosphorothioate
  modified_base 3: mod_base = OTHER; note = 2'-O-methylguanosine-3'-phosphate
  modified_base 4: mod_base = OTHER; note = 2'-O-methyladenosine-3'-phosphate
  modified_base 5: mod_base = OTHER; note = 2'-O-methylguanosine-3'-phosphate
  modified_base 6: mod_base = OTHER; note = 2'-deoxy-2'-fluorocytidine-3'-phosphate
  modified_base 7: mod_base = OTHER; note = 2'-O-methyladenosine-3'-phosphate
  modified_base 8: mod_base = OTHER; note = 2'-deoxy-2'-fluoroguanosine-3'-phosphate
  modified_base 9: mod_base = OTHER; note = 2'-deoxy-2'-fluorocytidine-3'-phosphate
  modified_base 10: mod_base = OTHER; note = 2'-O-methyluridine-3'-phosphate
  modified_base 11: mod_base = OTHER; note = 2'-O-methylcytidine-3'-phosphate
  modified_base 12: mod_base = OTHER; note = 2'-O-methylcytidine-3'-phosphate
  modified_base 13: mod_base = OTHER; note = 2'-O-methyluridine-3'-phosphate
  modified_base 14: mod_base = OTHER; note = 2'-deoxy-2'-fluoroguanosine-3'-phosphate
  modified_base 15: mod_base = OTHER; note = 2'-O-methyluridine-3'-phosphate
  modified_base 16: mod_base = OTHER; note = 2'-deoxy-2'-fluorouridine-3'-phosphate
  modified_base 17: mod_base = OTHER; note = 2'-O-methylcytidine-3'-phosphate
  modified_base 18: mod_base = OTHER; note = 2'-O-methylcytidine-3'-phosphate
  modified_base 19: mod_base = OTHER; note = 2'-O-methylcytidine-3'-phosphate
  modified_base 20: mod_base = OTHER; note = 2'-O-methyluridine-3'-phosphate
  modified_base 21: mod_base = OTHER; note = 2'-O-methylguanosine-3'-phosphorothioate
  modified_base 22: mod_base = OTHER; note = 2'-O-methylcytidine-3'-phosphorothioate
  modified_base 23: mod_base = OTHER; note = 2'-O-methylguanosine
atgagcagctcctgttccctgcg

SEQ ID NO: 553 - RNA, 23 nt, synthetic construct
  source 1..23: mol_type = other RNA
  modified_base 1: mod_base = OTHER; note = 2'-O-methyladenosine-3'-phosphorothioate
  modified_base 2: mod_base = OTHER; note = 2'-deoxy-2'-fluorouridine-3'-phosphorothioate
  modified_base 3: mod_base = OTHER; note = 2'-O-methyluridine-3'-phosphate
  modified_base 4: mod_base = OTHER; note = 2'-O-methylguanosine-3'-phosphate
  modified_base 5: mod_base = OTHER; note = 2'-O-methylguanosine-3'-phosphate
  modified_base 6: mod_base = OTHER; note = 2'-deoxy-2'-fluorocytidine-3'-phosphate
  modified_base 7: mod_base = OTHER; note = 2'-O-methyluridine-3'-phosphate
  modified_base 8: mod_base = OTHER; note = 2'-deoxy-2'-fluoroguanosine-3'-phosphate
  modified_base 9: mod_base = OTHER; note = 2'-deoxy-2'-fluoroadenosine-3'-phosphate
  modified_base 10: mod_base = OTHER; note = 2'-O-methylguanosine-3'-phosphate
  modified_base 11: mod_base = OTHER; note = 2'-O-methylcytidine-3'-phosphate
  modified_base 12: mod_base = OTHER; note = 2'-O-methyladenosine-3'-phosphate
  modified_base 13: mod_base = OTHER; note = 2'-O-methylguanosine-3'-phosphate
  modified_base 14: mod_base = OTHER; note = 2'-deoxy-2'-fluorocytidine-3'-phosphate
  modified_base 15: mod_base = OTHER; note = 2'-O-methyluridine-3'-phosphate
  modified_base 16: mod_base = OTHER; note = 2'-deoxy-2'-fluorocytidine-3'-phosphate
  modified_base 17: mod_base = OTHER; note = 2'-O-methylcytidine-3'-phosphate
  modified_base 18: mod_base = OTHER; note = 2'-O-methyluridine-3'-phosphate
  modified_base 19: mod_base = OTHER; note = 2'-O-methylguanosine-3'-phosphate
  modified_base 20: mod_base = OTHER; note = 2'-O-methyluridine-3'-phosphate
  modified_base 21: mod_base = OTHER; note = 2'-O-methyluridine-3'-phosphorothioate
  modified_base 22: mod_base = OTHER; note = 2'-O-methylcytidine-3'-phosphorothioate
  modified_base 23: mod_base = OTHER; note = 2'-O-methylcytidine
attggctgagcagctcctgttcc

SEQ ID NO: 554 - RNA, 23 nt, synthetic construct
  source 1..23: mol_type = other RNA
  modified_base 1: mod_base = OTHER; note = 2'-O-methyladenosine-3'-phosphorothioate
  modified_base 2: mod_base = OTHER; note = 2'-deoxy-2'-fluoroadenosine-3'-phosphorothioate
  modified_base 3: mod_base = OTHER; note = 2'-O-methylguanosine-3'-phosphate
  modified_base 4: mod_base = OTHER; note = 2'-O-methyluridine-3'-phosphate
  modified_base 5: mod_base = OTHER; note = 2'-O-methyluridine-3'-phosphate
  modified_base 6: mod_base = OTHER; note = 2'-deoxy-2'-fluorocytidine-3'-phosphate
  modified_base 7: mod_base = OTHER; note = 2'-O-methyluridine-3'-phosphate
  modified_base 8: mod_base = OTHER; note = 2'-deoxy-2'-fluorouridine-3'-phosphate
  modified_base 9: mod_base = OTHER; note = 2'-deoxy-2'-fluoroguanosine-3'-phosphate
  modified_base 10: mod_base = OTHER; note = 2'-O-methylguanosine-3'-phosphate
  modified_base 11: mod_base = OTHER; note = 2'-O-methylcytidine-3'-phosphate
  modified_base 12: mod_base = OTHER; note = 2'-O-methyluridine-3'-phosphate
  modified_base 13: mod_base = OTHER; note = 2'-O-methylguanosine-3'-phosphate
  modified_base 14: mod_base = OTHER; note = 2'-deoxy-2'-fluoroadenosine-3'-phosphate
  modified_base 15: mod_base = OTHER; note = 2'-O-methylguanosine-3'-phosphate
  modified_base 16: mod_base = OTHER; note = 2'-deoxy-2'-fluorocytidine-3'-phosphate
  modified_base 17: mod_base = OTHER; note = 2'-O-methyladenosine-3'-phosphate
  modified_base 18: mod_base = OTHER; note = 2'-O-methylguanosine-3'-phosphate
  modified_base 19: mod_base = OTHER; note = 2'-O-methylcytidine-3'-phosphate
  modified_base 20: mod_base = OTHER; note = 2'-O-methyluridine-3'-phosphate
  modified_base 21: mod_base = OTHER; note = 2'-O-methylcytidine-3'-phosphorothioate
  modified_base 22: mod_base = OTHER; note = 2'-O-methylcytidine-3'-phosphorothioate
  modified_base 23: mod_base = OTHER; note = 2'-O-methyluridine
aagttcttggctgagcagctcct

SEQ ID NO: 555 - RNA, 23 nt, synthetic construct
  source 1..23: mol_type = other RNA
  modified_base 1: mod_base = OTHER; note = 2'-O-methyladenosine-3'-phosphorothioate
  modified_base 2: mod_base = OTHER; note = 2'-deoxy-2'-fluoroguanosine-3'-phosphorothioate
  modified_base 3: mod_base = OTHER; note = 2'-O-methylcytidine-3'-phosphate
  modified_base 4: mod_base = OTHER; note = 2'-O-methylcytidine-3'-phosphate
  modified_base 5: mod_base = OTHER; note = 2'-O-methyladenosine-3'-phosphate
  modified_base 6: mod_base = OTHER; note = 2'-deoxy-2'-fluorocytidine-3'-phosphate
  modified_base 7: mod_base = OTHER; note = 2'-O-methyladenosine-3'-phosphate
  modified_base 8: mod_base = OTHER; note = 2'-deoxy-2'-fluoroguanosine-3'-phosphate
  modified_base 9: mod_base = OTHER; note = 2'-deoxy-2'-fluorouridine-3'-phosphate
  modified_base 10: mod_base = OTHER; note = 2'-O-methyluridine-3'-phosphate
  modified_base 11: mod_base = OTHER; note = 2'-O-methylcytidine-3'-phosphate
  modified_base 12: mod_base = OTHER; note = 2'-O-methyluridine-3'-phosphate
  modified_base 13: mod_base = OTHER; note = 2'-O-methyluridine-3'-phosphate
  modified_base 14: mod_base = OTHER; note = 2'-deoxy-2'-fluoroguanosine-3'-phosphate
  modified_base 15: mod_base = OTHER; note = 2'-O-methylguanosine-3'-phosphate
  modified_base 16: mod_base = OTHER; note = 2'-deoxy-2'-fluorocytidine-3'-phosphate
  modified_base 17: mod_base = OTHER; note = 2'-O-methyluridine-3'-phosphate
  modified_base 18: mod_base = OTHER; note = 2'-O-methylguanosine-3'-phosphate
  modified_base 19: mod_base = OTHER; note = 2'-O-methyladenosine-3'-phosphate
  modified_base 20: mod_base = OTHER; note = 2'-O-methylguanosine-3'-phosphate
  modified_base 21: mod_base = OTHER; note = 2'-O-methylcytidine-3'-phosphorothioate
  modified_base 22: mod_base = OTHER; note = 2'-O-methyladenosine-3'-phosphorothioate
  modified_base 23: mod_base = OTHER; note = 2'-O-methylguanosine
agccacagttcttggctgagcag

SEQ ID NO: 556 - RNA, 23 nt, synthetic construct
  source 1..23: mol_type = other RNA
  modified_base 1: mod_base = OTHER; note = 2'-O-methyladenosine-3'-phosphorothioate
  modified_base 2: mod_base = OTHER; note = 2'-deoxy-2'-fluorouridine-3'-phosphorothioate
  modified_base 3: mod_base = OTHER; note = 2'-O-methyladenosine-3'-phosphate
  modified_base 4: mod_base = OTHER; note = 2'-O-methyluridine-3'-phosphate
  modified_base 5: mod_base = OTHER; note = 2'-O-methylcytidine-3'-phosphate
  modified_base 6: mod_base = OTHER; note = 2'-deoxy-2'-fluorocytidine-3'-phosphate
  modified_base 7: mod_base = OTHER; note = 2'-O-methyluridine-3'-phosphate
  modified_base 8: mod_base = OTHER; note = 2'-deoxy-2'-fluorouridine-3'-phosphate
  modified_base 9: mod_base = OTHER; note = 2'-deoxy-2'-fluorocytidine-3'-phosphate
  modified_base 10: mod_base = OTHER; note = 2'-O-methylguanosine-3'-phosphate
  modified_base 11: mod_base = OTHER; note = 2'-O-methylguanosine-3'-phosphate
  modified_base 12: mod_base = OTHER; note = 2'-O-methylcytidine-3'-phosphate
  modified_base 13: mod_base = OTHER; note = 2'-O-methyladenosine-3'-phosphate
  modified_base 14: mod_base = OTHER; note = 2'-deoxy-2'-fluorouridine-3'-phosphate
  modified_base 15: mod_base = OTHER; note = 2'-O-methylcytidine-3'-phosphate
  modified_base 16: mod_base = OTHER; note = 2'-deoxy-2'-fluorocytidine-3'-phosphate
  modified_base 17: mod_base = OTHER; note = 2'-O-methyluridine-3'-phosphate
  modified_base 18: mod_base = OTHER; note = 2'-O-methylguanosine-3'-phosphate
  modified_base 19: mod_base = OTHER; note = 2'-O-methylguanosine-3'-phosphate
  modified_base 20: mod_base = OTHER; note = 2'-O-methylcytidine-3'-phosphate
  modified_base 21: mod_base = OTHER; note = 2'-O-methyladenosine-3'-phosphorothioate
  modified_base 22: mod_base = OTHER; note = 2'-O-methylguanosine-3'-phosphorothioate
  modified_base 23: mod_base = OTHER; note = 2'-O-methylcytidine
atatccttcggcatcctggcagc

SEQ ID NO: 557 - RNA, 23 nt, synthetic construct
  source 1..23: mol_type = other RNA
  modified_base 1: mod_base = OTHER; note = 2'-O-methyladenosine-3'-phosphorothioate
  modified_base 2: mod_base = OTHER; note = 2'-deoxy-2'-fluoroguanosine-3'-phosphorothioate
  modified_base 3: mod_base = OTHER; note = 2'-O-methyladenosine-3'-phosphate
  modified_base 4: mod_base = OTHER; note = 2'-O-methylcytidine-3'-phosphate
  modified_base 5: mod_base = OTHER; note = 2'-O-methyluridine-3'-phosphate
  modified_base 6: mod_base = OTHER; note = 2'-deoxy-2'-fluorouridine-3'-phosphate
  modified_base 7: mod_base = OTHER; note = 2'-O-methyluridine-3'-phosphate
  modified_base 8: mod_base = OTHER; note = 2'-deoxy-2'-fluorouridine-3'-phosphate
  modified_base 9: mod_base = OTHER; note = 2'-deoxy-2'-fluoroadenosine-3'-phosphate
  modified_base 10: mod_base = OTHER; note = 2'-O-methyluridine-3'-phosphate
  modified_base 11: mod_base = OTHER; note = 2'-O-methyluridine-3'-phosphate
  modified_base 12: mod_base = OTHER; note = 2'-O-methylguanosine-3'-phosphate
  modified_base 13: mod_base = OTHER; note = 2'-O-methyladenosine-3'-phosphate
  modified_base 14: mod_base = OTHER; note = 2'-deoxy-2'-fluorocytidine-3'-phosphate
  modified_base 15: mod_base = OTHER; note = 2'-O-methylcytidine-3'-phosphate
  modified_base 16: mod_base = OTHER; note = 2'-deoxy-2'-fluoroadenosine-3'-phosphate
  modified_base 17: mod_base = OTHER; note = 2'-O-methylcytidine-3'-phosphate
  modified_base 18: mod_base = OTHER; note = 2'-O-methyladenosine-3'-phosphate
  modified_base 19: mod_base = OTHER; note = 2'-O-methyluridine-3'-phosphate
  modified_base 20: mod_base = OTHER; note = 2'-O-methylguanosine-3'-phosphate
  modified_base 21: mod_base = OTHER; note = 2'-O-methyladenosine-3'-phosphorothioate
  modified_base 22: mod_base = OTHER; note = 2'-O-methylcytidine-3'-phosphorothioate
  modified_base 23: mod_base = OTHER; note = 2'-O-methylcytidine
agacttttattgaccacatgacc

SEQ ID NO: 558 - RNA, 23 nt, synthetic construct
  source 1..23: mol_type = other RNA
  modified_base 1: mod_base = OTHER; note = 2'-O-methyladenosine-3'-phosphorothioate
  modified_base 2: mod_base = OTHER; note = 2'-deoxy-2'-fluorocytidine-3'-phosphorothioate
  modified_base 3: mod_base = OTHER; note = 2'-O-methyladenosine-3'-phosphate
  modified_base 4: mod_base = OTHER; note = 2'-O-methylcytidine-3'-phosphate
  modified_base 5: mod_base = OTHER; note = 2'-O-methylcytidine-3'-phosphate
  modified_base 6: mod_base = OTHER; note = 2'-deoxy-2'-fluorouridine-3'-phosphate
  modified_base 7: mod_base = OTHER; note = 2'-O-methyladenosine-3'-phosphate
  modified_base 8: mod_base = OTHER; note = 2'-deoxy-2'-fluoroadenosine-3'-phosphate
  modified_base 9: mod_base = OTHER; note = 2'-deoxy-2'-fluoroguanosine-3'-phosphate
  modified_base 10: mod_base = OTHER; note = 2'-O-methylguanosine-3'-phosphate
  modified_base 11: mod_base = OTHER; note = 2'-O-methyladenosine-3'-phosphate
  modified_base 12: mod_base = OTHER; note = 2'-O-methylcytidine-3'-phosphate
  modified_base 13: mod_base = OTHER; note = 2'-O-methyluridine-3'-phosphate
  modified_base 14: mod_base = OTHER; note = 2'-deoxy-2'-fluorouridine-3'-phosphate
  modified_base 15: mod_base = OTHER; note = 2'-O-methyluridine-3'-phosphate
  modified_base 16: mod_base = OTHER; note = 2'-deoxy-2'-fluorouridine-3'-phosphate
  modified_base 17: mod_base = OTHER; note = 2'-O-methyladenosine-3'-phosphate
  modified_base 18: mod_base = OTHER; note = 2'-O-methyluridine-3'-phosphate
  modified_base 19: mod_base = OTHER; note = 2'-O-methyluridine-3'-phosphate
  modified_base 20: mod_base = OTHER; note = 2'-O-methylguanosine-3'-phosphate
  modified_base 21: mod_base = OTHER; note = 2'-O-methyladenosine-3'-phosphorothioate
  modified_base 22: mod_base = OTHER; note = 2'-O-methylcytidine-3'-phosphorothioate
  modified_base 23: mod_base = OTHER; note = 2'-O-methylcytidine
acacctaaggacttttattgacc

SEQ ID NO: 559 - RNA, 23 nt, synthetic construct
  source 1..23: mol_type = other RNA
  modified_base 1: mod_base = OTHER; note = 2'-O-methyladenosine-3'-phosphorothioate
  modified_base 2: mod_base = OTHER; note = 2'-deoxy-2'-fluoroguanosine-3'-phosphorothioate
  modified_base 3: mod_base = OTHER; note = 2'-O-methylguanosine-3'-phosphate
  modified_base 4: mod_base = OTHER; note = 2'-O-methylcytidine-3'-phosphate
  modified_base 5: mod_base = OTHER; note = 2'-O-methyladenosine-3'-phosphate
  modified_base 6: mod_base = OTHER; note = 2'-deoxy-2'-fluoroguanosine-3'-phosphate
  modified_base 7: mod_base = OTHER; note = 2'-O-methylcytidine-3'-phosphate
  modified_base 8: mod_base = OTHER; note = 2'-deoxy-2'-fluoroadenosine-3'-phosphate
  modified_base 9: mod_base = OTHER; note = 2'-deoxy-2'-fluorocytidine-3'-phosphate
  modified_base 10: mod_base = OTHER; note = 2'-O-methylcytidine-3'-phosphate
  modified_base 11: mod_base = OTHER; note = 2'-O-methyluridine-3'-phosphate
  modified_base 12: mod_base = OTHER; note = 2'-O-methyladenosine-3'-phosphate
  modified_base 13: mod_base = OTHER; note = 2'-O-methyladenosine-3'-phosphate
  modified_base 14: mod_base = OTHER; note = 2'-deoxy-2'-fluoroguanosine-3'-phosphate
  modified_base 15: mod_base = OTHER; note = 2'-O-methylguanosine-3'-phosphate
  modified_base 16: mod_base = OTHER; note = 2'-deoxy-2'-fluoroadenosine-3'-phosphate
  modified_base 17: mod_base = OTHER; note = 2'-O-methylcytidine-3'-phosphate
  modified_base 18: mod_base = OTHER; note = 2'-O-methyluridine-3'-phosphate
  modified_base 19: mod_base = OTHER; note = 2'-O-methyluridine-3'-phosphate
  modified_base 20: mod_base = OTHER; note = 2'-O-methyluridine-3'-phosphate
  modified_base 21: mod_base = OTHER; note = 2'-O-methyluridine-3'-phosphorothioate
  modified_base 22: mod_base = OTHER; note = 2'-O-methyladenosine-3'-phosphorothioate
  modified_base 23: mod_base = OTHER; note = 2'-O-methyluridine
aggcagcacctaaggacttttat

SEQ ID NO: 560 - RNA, 23 nt, synthetic construct
  source 1..23: mol_type = other RNA
agagaaccttccctggtgtggag

SEQ ID NO: 561 - RNA, 23 nt, synthetic construct
  source 1..23: mol_type = other RNA
accttccctggtgtggaggcagc

SEQ ID NO: 562 - RNA, 23 nt, synthetic construct
  source 1..23: mol_type = other RNA
cccaggatgctccggacctgtta

SEQ ID NO: 563 - RNA, 23 nt, synthetic construct
  source 1..23: mol_type = other RNA
gatgctccggacctgttacgtgc

SEQ ID NO: 564 - RNA, 23 nt, synthetic construct
  source 1..23: mol_type = other RNA
cggacctgttacgtgctctgttc

SEQ ID NO: 565 - RNA, 23 nt, synthetic construct
  source 1..23: mol_type = other RNA
gttacgtgctctgttcccaagct

SEQ ID NO: 566 - RNA, 23 nt, synthetic construct
  source 1..23: mol_type = other RNA
gtgctctgttcccaagctggtcc

SEQ ID NO: 567 - RNA, 23 nt, synthetic construct
  source 1..23: mol_type = other RNA
ggctggcagtccctgagctttga

SEQ ID NO: 568 - RNA, 23 nt, synthetic construct
  source 1..23: mol_type = other RNA
cagtccctgagctttgatggcgg

SEQ ID NO: 569 - RNA, 23 nt, synthetic construct
  source 1..23: mol_type = other RNA
gggccttccaccttaagggcaca

SEQ ID NO: 570 - RNA, 23 nt, synthetic construct
  source 1..23: mol_type = other RNA
tccaccttaagggcacaggagag

SEQ ID NO: 571 - RNA, 23 nt, synthetic construct
  source 1..23: mol_type = other RNA
aagggcacaggagagctgacacg

SEQ ID NO: 572 - RNA, 23 nt, synthetic construct
  source 1..23: mol_type = other RNA
caggagagctgacacgggccttg

SEQ ID NO: 573 - RNA, 23 nt, synthetic construct
  source 1..23: mol_type = other RNA
ctgacacgggccttgctggttct

SEQ ID NO: 574 - RNA, 23 nt, synthetic construct
  source 1..23: mol_type = other RNA
gccttgctggttctccggctgtg

SEQ ID NO: 575 - RNA, 23 nt, synthetic construct
  source 1..23: mol_type = other RNA
ctggttctccggctgtgtgcctg

SEQ ID NO: 576 - RNA, 23 nt, synthetic construct
  source 1..23: mol_type = other RNA
cactcgtcactcacgggctgttg

SEQ ID NO: 577 - RNA, 23 nt, synthetic construct
  source 1..23: mol_type = other RNA
cactcacgggctgttgctccagg

SEQ ID NO: 578 - RNA, 23 nt, synthetic construct
  source 1..23: mol_type = other RNA
tgttgctccaggcctggtctcgg

SEQ ID NO: 579 - RNA, 23 nt, synthetic construct
  source 1..23: mol_type = other RNA
ccggctctcaggcgcatttctcc

SEQ ID NO: 580 - RNA, 23 nt, synthetic construct
  source 1..23: mol_type = other RNA
tctcaggcgcatttctccgagca

SEQ ID NO: 581 - RNA, 23 nt, synthetic construct
  source 1..23: mol_type = other RNA
ggcgcatttctccgagcatccgt

SEQ ID NO: 582 - RNA, 23 nt, synthetic construct
  source 1..23: mol_type = other RNA
atttctccgagcatccgtctatg

SEQ ID NO: 583 - RNA, 23 nt, synthetic construct
  source 1..23: mol_type = other RNA
ccgagcatccgtctatgggcagt

SEQ ID NO: 584 - RNA, 23 nt, synthetic construct
  source 1..23: mol_type = other RNA
catccgtctatgggcagtttgtg

SEQ ID NO: 585 - RNA, 23 nt, synthetic construct
  source 1..23: mol_type = other RNA
tctatgggcagtttgtggctggt

SEQ ID NO: 586 - RNA, 23 nt, synthetic construct
  source 1..23: mol_type = other RNA
ggcagtttgtggctggtgagaca

SEQ ID NO: 587 - RNA, 23 nt, synthetic construct
  source 1..23: mol_type = other RNA
tgtggctggtgagacagcagagg

SEQ ID NO: 588 - RNA, 23 nt, synthetic construct
  source 1..23: mol_type = other RNA
tggtgagacagcagaggaggtga

SEQ ID NO: 589 - RNA, 23 nt, synthetic construct
  source 1..23: mol_type = other RNA
acagcagaggaggtgaagggctg

SEQ ID NO: 590 - RNA, 23 nt, synthetic construct
  source 1..23: mol_type = other RNA
aggaggtgaagggctgcgtgcag

SEQ ID NO: 591 - RNA, 23 nt, synthetic construct
  source 1..23: mol_type = other RNA
tgaagggctgcgtgcagcagctg

SEQ ID NO: 592 - RNA, 23 nt, synthetic construct
  source 1..23: mol_type = other RNA
actgctggcagtgcccactgagg

SEQ ID NO: 593 - RNA, 23 nt, synthetic construct
  source 1..23: mol_type = other RNA
tggcagtgcccactgaggaggag

SEQ ID NO: 594 - RNA, 23 nt, synthetic construct
  source 1..23: mol_type = other RNA
cactgaggaggagccggactctg

SEQ ID NO: 595 - RNA, 23 nt, synthetic construct
  source 1..23: mol_type = other RNA
aggagccggactctgctgccaag

SEQ ID NO: 596 - RNA, 23 nt, synthetic construct
  source 1..23: mol_type = other RNA
ggactctgctgccaagagtggtg

SEQ ID NO: 597 - RNA, 23 nt, synthetic construct
  source 1..23: mol_type = other RNA
ctgctgccaagagtggtgaggcg

SEQ ID NO: 598 - RNA, 23 nt, synthetic construct
  source 1..23: mol_type = other RNA
agagtggtgaggcgtggtatgag

SEQ ID NO: 599 - RNA, 23 nt, synthetic construct
  source 1..23: mol_type = other RNA
ggaacctcggtgctatgctgcgg

SEQ ID NO: 600 - RNA, 23 nt, synthetic construct
  source 1..23: mol_type = other RNA
ctcggtgctatgctgcggtgtgt

SEQ ID NO: 601 - RNA, 23 nt, synthetic construct
  source 1..23: mol_type = other RNA
tgctatgctgcggtgtgtggacc

SEQ ID NO: 602 - RNA, 23 nt, synthetic construct
  source 1..23: mol_type = other RNA
tgcggtgtgtggacctgtcacgg

SEQ ID NO: 603 - RNA, 23 nt, synthetic construct
  source 1..23: mol_type = other RNA
gaggccagcctcatgcagctgaa

SEQ ID NO: 604 - RNA, 23 nt, synthetic construct
  source 1..23: mol_type = other RNA
cagcctcatgcagctgaaggtga

SEQ ID NO: 605 - RNA, 23 nt, synthetic construct
  source 1..23: mol_type = other RNA
tcatgcagctgaaggtgacggcg

SEQ ID NO: 606 - RNA, 23 nt, synthetic construct
  source 1..23: mol_type = other RNA
cagctgaaggtgacggcgctgac

SEQ ID NO: 607 - RNA, 23 nt, synthetic construct
  source 1..23: mol_type = other RNA
aaggtgacggcgctgaccagtac

SEQ ID NO: 608 - RNA, 23 nt, synthetic construct
  source 1..23: mol_type = other RNA
gcgctgaccagtactcggctctg

SEQ ID NO: 609 - RNA, 23 nt, synthetic construct
  source 1..23: mol_type = other RNA
ccagtactcggctctgtaaggag

SEQ ID NO: 610 - RNA, 23 nt, synthetic construct
  source 1..23: mol_type = other RNA
actcggctctgtaaggagctagc

SEQ ID NO: 611 - RNA, 23 nt, synthetic construct
  source 1..23: mol_type = other RNA
ctctgtaaggagctagcctcgtg

SEQ ID NO: 612 - RNA, 23 nt, synthetic construct
  source 1..23: mol_type = other RNA
taaggagctagcctcgtgggtca

SEQ ID NO: 613 - RNA, 23 nt, synthetic construct
  source 1..23: mol_type = other RNA
ctagcctcgtgggtcagaaggcc

SEQ ID NO: 614 - RNA, 23 nt, synthetic construct
  source 1..23: mol_type = other RNA
tcgtgggtcagaaggccaggagc

SEQ ID NO: 615 - RNA, 23 nt, synthetic construct
  source 1..23: mol_type = other RNA
aaggccaggagcctccttggagc

SEQ ID NO: 616 - RNA, 23 nt, synthetic construct
  source 1..23: mol_type = other RNA
caggagcctccttggagctgagc

SEQ ID NO: 617 - RNA, 23 nt, synthetic construct
  source 1..23: mol_type = other RNA
ccgagaggctggctgaagctatg

SEQ ID NO: 618 - RNA, 23 nt, synthetic construct
  source 1..23: mol_type = other RNA
ctggctgaagctatggactctgg

SEQ ID NO: 619 - RNA, 23 nt, synthetic construct
  source 1..23: mol_type = other RNA
aagctatggactctgggcagaac

SEQ ID NO: 620 - RNA, 23 nt, synthetic construct
  source 1..23: mol_type = other RNA
gactctgggcagaacctccaggt

SEQ ID NO: 621 - RNA, 23 nt, synthetic construct
  source 1..23: mol_type = other RNA
cagaacctccaggtctcctgcct

SEQ ID NO: 622 - RNA, 23 nt, synthetic construct
  source 1..23: mol_type = other RNA
cctccaggtctcctgcctcaatg

SEQ ID NO: 623 - RNA, 23 nt, synthetic construct
  source 1..23: mol_type = other RNA
tctcctgcctcaatgctgagcag

SEQ ID NO: 624 - RNA, 23 nt, synthetic construct
  source 1..23: mol_type = other RNA
cctcaatgctgagcagaaccagc

SEQ ID NO: 625 - RNA, 23 nt, synthetic construct
  source 1..23: mol_type = other RNA
atgctgagcagaaccagcacctc

SEQ ID NO: 626 - RNA, 23 nt, synthetic construct
  source 1..23: mol_type = other RNA
ctgcatcgggtggcacagtatgc

SEQ ID NO: 627 - RNA, 23 nt, synthetic construct
  source 1..23: mol_type = other RNA
ggctcctggtggatgcggagtac

SEQ ID NO: 628 - RNA, 23 nt, synthetic construct
  source 1..23: mol_type = other RNA
ggtggatgcggagtacacctcac

SEQ ID NO: 629 - RNA, 23 nt, synthetic construct
  source 1..23: mol_type = other RNA
atgcggagtacacctcactgaac

SEQ ID NO: 630 - RNA, 23 nt, synthetic construct
  source 1..23: mol_type = other RNA
gagtacacctcactgaaccctgc

SEQ ID NO: 631 - RNA, 23 nt, synthetic construct
  source 1..23: mol_type = other RNA
cctcactgaaccctgcgctctcg

SEQ ID NO: 632 - RNA, 23 nt, synthetic construct
  source 1..23: mol_type = other RNA
tgaaccctgcgctctcgctgctg

SEQ ID NO: 633 - RNA, 23 nt, synthetic construct
  source 1..23: mol_type = other RNA
ggccctgggtgtggaacacctac

SEQ ID NO: 634 - RNA, 23 nt, synthetic construct
  source 1..23: mol_type = other RNA
tgggtgtggaacacctaccaggc

SEQ ID NO: 635 - RNA, 23 nt, synthetic construct
  source 1..23: mol_type = other RNA
acacctaccaggcctgtctaaag

SEQ ID NO: 636 - RNA, 23 nt, synthetic construct
  source 1..23: mol_type = other RNA
aggcctgtctaaaggacacattc

SEQ ID NO: 637 - RNA, 23 nt, synthetic construct
  source 1..23: mol_type = other RNA
tgtctaaaggacacattcgagcg

SEQ ID NO: 638 - RNA, 23 nt, synthetic construct
  source 1..23: mol_type = other RNA
aaggacacattcgagcggctggg

SEQ ID NO: 639 - RNA, 23 nt, synthetic construct
  source 1..23: mol_type = other RNA
ctggccttcggagtgaagctggt

SEQ ID NO: 640 - RNA, 23 nt, synthetic construct
  source 1..23: mol_type = other RNA
ttcggagtgaagctggtacgagg

SEQ ID NO: 641 - RNA, 23 nt, synthetic construct
  source 1..23: mol_type = other RNA
agtgaagctggtacgaggtgcat

SEQ ID NO: 642 - RNA, 23 nt, synthetic construct
  source 1..23: mol_type = other RNA
agctggtacgaggtgcatatctg

SEQ ID NO: 643 - RNA, 23 nt, synthetic construct
  source 1..23: mol_type = other RNA
acgaggtgcatatctggacaagg

SEQ ID NO: 644 - RNA, 23 nt, synthetic construct
  source 1..23: mol_type = other RNA
tgcatatctggacaaggagagag

SEQ ID NO: 645 - RNA, 23 nt, synthetic construct
  source 1..23: mol_type = other RNA
atctggacaaggagagagcggtg

SEQ ID NO: 646 - RNA, 23 nt, synthetic construct
  source 1..23: mol_type = other RNA
tggcccagctccatgggatggaa

SEQ ID NO: 647 - RNA, 23 nt, synthetic construct
  source 1..23: mol_type = other RNA
cagctccatgggatggaagaccc

SEQ ID NO: 648 - RNA, 23 nt, synthetic construct
  source 1..23: mol_type = other RNA
cactcagcctgactatgaggcca

SEQ ID NO: 649 - RNA, 23 nt, synthetic construct
  source 1..23: mol_type = other RNA
ctgactatgaggccaccagtcag

SEQ ID NO: 650 - RNA, 23 nt, synthetic construct
  source 1..23: mol_type = other RNA
atgaggccaccagtcagagttac

SEQ ID NO: 651 - RNA, 23 nt, synthetic construct
  source 1..23: mol_type = other RNA
ccaccagtcagagttacagccgc

SEQ ID NO: 652 - RNA, 23 nt, synthetic construct
  source 1..23: mol_type = other RNA
agtcagagttacagccgctgcct

SEQ ID NO: 653 - RNA, 23 nt, synthetic construct
  source 1..23: mol_type = other RNA
tacagccgctgcctggaactgat

SEQ ID NO: 654 - RNA, 23 nt, synthetic construct
  source 1..23: mol_type = other RNA
ccgctgcctggaactgatgctga

SEQ ID NO: 655 - RNA, 23 nt, synthetic construct
  source 1..23: mol_type = other RNA
ctggaactgatgctgacgcacgt

SEQ ID NO: 656 - RNA, 23 nt, synthetic construct
  source 1..23: mol_type = other RNA
actgatgctgacgcacgtggccc

SEQ ID NO: 657 - RNA, 23 nt, synthetic construct
  source 1..23: mol_type = other RNA
cccatgtgccacctcatggtggc

SEQ ID NO: 658 - RNA, 23 nt, synthetic construct
  source 1..23: mol_type = other RNA
acctcatggtggcttcccacaat

SEQ ID NO: 659 - RNA, 23 nt, synthetic construct
  source 1..23: mol_type = other RNA
gtggcttcccacaatgaggaatc

SEQ ID NO: 660 - RNA, 23 nt, synthetic construct
  source 1..23: mol_type = other RNA
ttcccacaatgaggaatctgttc

SEQ ID NO: 661 - RNA, 23 nt, synthetic construct
  source 1..23: mol_type = other RNA
acaatgaggaatctgttcgccag

SEQ ID NO: 662 - RNA, 23 nt, synthetic construct
  source 1..23: mol_type = other RNA
aatctgttcgccaggcaaccaag

SEQ ID NO: 663 - RNA, 23 nt, synthetic construct
  source 1..23: mol_type = other RNA
gttcgccaggcaaccaagcgcat

SEQ ID NO: 664 - RNA, 23 nt, synthetic construct
  source 1..23: mol_type = other RNA
aggcaaccaagcgcatgtgggag

SEQ ID NO: 665 - RNA, 23 nt, synthetic construct
  source 1..23: mol_type = other RNA
accaagcgcatgtgggagctggg

SEQ ID NO: 666 - RNA, 23 nt, synthetic construct
  source 1..23: mol_type = other RNA
gcgcatgtgggagctgggcattc

SEQ ID NO: 667 - RNA, 23 nt, synthetic construct
  source 1..23: mol_type = other RNA
tgtgggagctgggcattcctctg

SEQ ID NO: 668 - RNA, 23 nt, synthetic construct
  source 1..23: mol_type = other RNA
ctgggcattcctctggatgggac

SEQ ID NO: 669 - RNA, 23 nt, synthetic construct
  source 1..23: mol_type = other RNA
cattcctctggatgggactgtct

SEQ ID NO: 670 - RNA, 23 nt, synthetic construct
  source 1..23: mol_type = other RNA
ctctggatgggactgtctgtttc

SEQ ID NO: 671 - RNA, 23 nt, synthetic construct
  source 1..23: mol_type = other RNA
gatgggactgtctgtttcggaca

SEQ ID NO: 672 - RNA, 23 nt, synthetic construct
  source 1..23: mol_type = other RNA
gactgtctgtttcggacaacttc

SEQ ID NO: 673 - RNA, 23 nt, synthetic construct
  source 1..23: mol_type = other RNA
gtttcggacaacttctgggcatg

SEQ ID NO: 674 - RNA, 23 nt, synthetic construct
  source 1..23: mol_type = other RNA
aacttctgggcatgtgtgaccac

SEQ ID NO: 675 - RNA, 23 nt, synthetic construct
  source 1..23: mol_type = other RNA
gcatgtgtgaccacgtctctcta

SEQ ID NO: 676 - RNA, 23 nt, synthetic construct
  source 1..23: mol_type = other RNA
gtgaccacgtctctctagcactg

SEQ ID NO: 677 - RNA, 23 nt, synthetic construct
  source 1..23: mol_type = other RNA
gggcaggccggctatgtagtgta

SEQ ID NO: 678 - RNA, 23 nt, synthetic construct
  source 1..23: mol_type = other RNA
ggccggctatgtagtgtataagt

SEQ ID NO: 679 - RNA, 23 nt, synthetic construct
  source 1..23: mol_type = other RNA
ctatgtagtgtataagtccattc

SEQ ID NO: 680 - RNA, 23 nt, synthetic construct
  source 1..23: mol_type = other RNA
tagtgtataagtccattccctat

SEQ ID NO: 681 - RNA, 23 nt, synthetic construct
  source 1..23: mol_type = other RNA
ataagtccattccctatggctcc

SEQ ID NO: 682 - RNA, 23 nt, synthetic construct
  source 1..23: mol_type = other RNA
cattccctatggctccttggagg

SEQ ID NO: 683 - RNA, 23 nt, synthetic construct
  source 1..23: mol_type = other RNA
atggctccttggaggaggtaatc

SEQ ID NO: 684 - RNA, 23 nt, synthetic construct
  source 1..23: mol_type = other RNA
tgatccggagggcccaggagaac

SEQ ID NO: 685 - RNA, 23 nt, synthetic construct
  source 1..23: mol_type = other RNA
gagaaccggagcgtgcttcaggg

SEQ ID NO: 686 - RNA, 23 nt, synthetic construct
  source 1..23: mol_type = other RNA
ttcagggtgcccgcagggaacag

SEQ ID NO: 687 - RNA, 23 nt, synthetic construct
  source 1..23: mol_type = other RNA
cgcagggaacaggagctgctcag

SEQ ID NO: 688 - RNA, 23 nt, synthetic construct
  source 1..23: mol_type = other RNA
ggaacaggagctgctcagccaag

SEQ ID NO: 689 - RNA, 23 nt, synthetic construct
  source 1..23: mol_type = other RNA
aggagctgctcagccaagaactg

SEQ ID NO: 690 - RNA, 23 nt, synthetic construct
  source 1..23: mol_type = other RNA
ctgctcagccaagaactgtggcg

SEQ ID NO: 691 - RNA, 23 nt, synthetic construct
  source 1..23: mol_type = other RNA
gctgccaggatgccgaaggatac

SEQ ID NO: 692 - RNA, 23 nt, synthetic construct
  source 1..23: mol_type = other RNA
ggtcatgtggtcaataaaagtcc

SEQ ID NO: 693 - RNA, 23 nt, synthetic construct
  source 1..23: mol_type = other RNA
ggtcaataaaagtccttaggtgc

SEQ ID NO: 694 - RNA, 23 nt, synthetic construct
  source 1..23: mol_type = other RNA
ataaaagtccttaggtgctgcct

1. A double stranded ribonucleic acid (dsRNA) agent for inhibiting expression of proline dehydrogenase 2 (PRODH2) in a cell,
a) wherein the dsRNA agent comprises a sense strand and an antisense strand forming a double stranded region, wherein the sense strand comprises at least 15 contiguous nucleotides differing by no more than 3 nucleotides from any one of the nucleotide sequence of SEQ ID NO:1, and said antisense strand comprises at least 15 contiguous nucleotides differing by no more than 3 nucleotides from any one of the nucleotide sequence of SEQ ID NO: 2;
b) wherein the dsRNA agent comprises a sense strand and an antisense strand forming a double stranded region, wherein the antisense strand comprises a region of complementarity to an mRNA encoding PRODH2, and wherein the region of complementarity comprises at least 15 contiguous nucleotides differing by no more than 3 nucleotides from any one of the antisense nucleotide sequences in any one of Tables 2-3; or
c) wherein the dsRNA agent comprises a sense strand and an antisense strand forming a double stranded region, wherein the sense strand comprises at least 15 contiguous nucleotides differing by no more than 3 nucleotides from any one of the nucleotide sequence of nucleotides 47-69, 262-284, 273-295, 545-567, 611-633, 655-677, 942-964, 949-971, 1119-1141, 1173-1195, 1183-1205, 1215-1237, 1243-1265, 1249-1271, 1254-1276, 1354-1376, 1436-1458, and 1444-1466 of SEQ ID NO:1, and the antisense strand comprises at least 15 contiguous nucleotides from the corresponding nucleotide sequence of SEQ ID NO: 2.

2.-6. (canceled)

7. The dsRNA agent of claim 1, wherein all of the nucleotides of the sense strand and all of the nucleotides of the antisense strand comprise a nucleotide modification.

8. The dsRNA agent of claim 7, wherein at least one of the nucleotide modifications is selected from the group consisting of a deoxy-nucleotide modification, a 3′-terminal deoxythimidine (dT) nucleotide modification, a 2′-O-methyl nucleotide modification, a 2′-fluoro nucleotide modification, a 2′-deoxy nucleotide modification, a 2′-5′-linked ribonucleotide (3′-RNA) modification, a locked nucleotide modification, an unlocked nucleotide modification, a conformationally restricted nucleotide modification, a constrained ethyl nucleotide modification, an abasic nucleotide modification, a 2′-amino nucleotide modification, a 2′-O-allyl nucleotide modification, 2′-C-alkyl nucleotide modification, 2′-hydroxly nucleotide modification, a 2′-methoxyethyl modified nucleotide modification, a 2′-O-alkyl nucleotide modification, a morpholino nucleotide modification, a phosphoramidate modification, a non-natural base comprising nucleotide modification, a tetrahydropyran modified nucleotide modification, a 1,5-anhydrohexitol nucleotide modification, a cyclohexenyl nucleotide modification, a nucleotide comprising a phosphorothioate group modification, a nucleotide comprising a methylphosphonate group modification, a nucleotide comprising a 5′-phosphate modification, a nucleotide comprising a 5′-phosphate mimic modification, a thermally destabilizing nucleotide modification, a glycol nucleotide (GNA) modification, a glycol nucleic acid S-Isomer (S-GNA) modification, a nucleotide comprising a 2′ phosphate modification, and a 2-O—(N-methylacetamide) modified nucleotide modification; and combinations thereof.

9. (canceled)

10. (canceled)

11. The dsRNA agent of claim 1, wherein the double stranded region is 19-30 nucleotide pairs in length.

12.-15. (canceled)

16. The dsRNA agent of claim 1, wherein each strand is independently no more than 30 nucleotides in length.

17.-20. (canceled)

21. The dsRNA agent of claim 1, wherein at least one strand comprises a 3′ overhang of at least 1 nucleotide.

22. (canceled)

23. The dsRNA agent of claim 1, further comprising a ligand.

24. The dsRNA agent of claim 23, wherein the ligand is conjugated to the 3′ end of the sense strand of the dsRNA agent.

25. The dsRNA agent of claim 23, wherein the ligand is an N-acetylgalactosamine (GalNAc) derivative.

26. The dsRNA agent of claim 23, wherein the ligand is one or more GalNAc derivatives attached through a monovalent, bivalent, or trivalent branched linker.

27. The dsRNA agent of claim 25, wherein the ligand is

[chemical structure]

28. The dsRNA agent of claim 27, wherein the dsRNA agent is conjugated to the ligand as shown in the following schematic [chemical structure]
and, wherein X is O or S.

29. The dsRNA agent of claim 28, wherein the X is O.

30. The dsRNA agent of claim 1, wherein the dsRNA agent further comprises at least one phosphorothioate or methylphosphonate internucleotide linkage.

31.-39. (canceled)

40. An isolated cell containing the dsRNA agent of claim 1.

41. A pharmaceutical composition for inhibiting expression of a gene encoding proline dehydrogenase 2 (PRODH2) comprising the dsRNA agent of claim 1.

42.-46. (canceled)

47. A method of inhibiting expression of a proline dehydrogenase 2 (PRODH2) gene in a cell, the method comprising contacting the cell with the dsRNA agent of claim 1, thereby inhibiting expression of the PRODH2 gene in the cell.

48.-57. (canceled)

58. A method of treating a subject having a disorder that would benefit from reduction in proline dehydrogenase 2 (PRODH2) expression, comprising administering to the subject a therapeutically effective amount of the dsRNA agent of claim 1, thereby treating the subject having the disorder that would benefit from reduction in PRODH2 expression.

59. (canceled)

60. The method of claim 58, wherein the disorder is a PRODH2-associated disorder.

61.-75. (canceled)

76. A kit, a vial, or a syringe comprising the dsRNA agent of claim 1.

77.-79. (canceled)
